(19) United States
(12) Patent Application Publication
(10) Pub. No.: US 2023/0159945 A1
(43) Pub. Date: May 25, 2023

(54) METHOD

(71) Applicants: R.J. REYNOLDS TOBACCO COMPANY, Winston-Salem, NC (US); BRITISH AMERICAN TOBACCO (INVESTMENTS) LIMITED, London (GB)

(72) Inventors: Darlene Madeline Lawson, Winston-Salem, NC (US); Xingpeng Li, Winston-Salem, NC (US); Matthew Edward Humphry, London (GB); Sara Ben Khaled, London (GB)

(21) Appl. No.: 17/995,675

(22) PCT Filed: Apr. 9, 2021
(86) PCT No.: PCT/EP2021/059302

§ 371 Date: Oct. 6, 2022

Related U.S. Application Data
(60) Provisional application No. 63/007,644, filed on Apr. 9, 2020.

(51) Int. Cl. C12N 15/82; A24B 15/10; A24B 13/00; A24F 40/20

(52) U.S. Cl. CPC C12N 15/8243; C12N 15/8218; A24B 15/10; A24B 13/00; A24F 40/20

(57) ABSTRACT

The present invention provides a method for modulating (e.g. decreasing) the nicotine content of a plant (e.g. a tobacco plant) or part thereof, or tobacco plant cell, the method comprising modifying said plant or cell providing at least one mutation in a Nic3 locus. The present invention provides a method for modulating (e.g. decreasing) the nicotine content of a plant (e.g. a tobacco plant) or part thereof, or tobacco plant cell, the method comprising modifying said plant or cell to modulate the expression or activity of at least one Nic3 gene. The present invention also provides for the use of the Nic3 locus for modulating the alkaloid content of a plant, as well as tobacco cells, plants, plant propagation materials, harvested leaves, processed tobaccos, or delivery systems obtainable in accordance with the invention.

### FIELD OF THE INVENTION

[0001] The present invention relates to methods of modulating (e.g. decreasing) the alkaloid content e.g. nicotine content of a tobacco plant or part thereof or tobacco plant cell. The invention also extends to methods of modulating the expression and/or activity of polypeptides encoded by genes which modulate alkaloid content within plants. Alternatively, the invention provides methods of modulating the expression and/or activity of genes which encode polypeptides which modulate alkaloid content (e.g. nicotine content) within plants. The invention also extends to methods of modulating (e.g. decreasing) alkaloid content within plants by introducing mutations to tobacco plants or parts thereof or tobacco plant cells. The invention relates to plants produced by any of the methods herein. The invention also extends to constructs, which can be used to modulate the polypeptides, tobacco plant cells transformed with such constructs, and to transgenic tobacco plants themselves. The invention also relates to the use of harvested leaves from tobacco plants according to the invention having modulating alkaloid content (e.g. nicotine content), and delivery systems (e.g. combustible aerosol provision system, non-combustible aerosol provision system or aerosol-free delivery systems) comprising such leaves or extracts thereof. The invention also relates to the use of tobacco plants according to the invention having low alkaloid content (e.g. nicotine content) in molecular farming.

### BACKGROUND

[0002] Alkaloids are a group of naturally occurring compounds which mostly contain basic nitrogen atoms and are produced by a large variety of organisms including bacteria, fungi, plants and animals. Alkaloids may be classified according to the similarity of the carbon skeleton e.g. indole-, isoquinoline- and pyridine-like. Pyridine derivatives are one class of monomeric alkaloids; this class includes simple derivatives of pyridine, polycyclic condensed and noncondensing pyridine derivatives and sesquiterpene pyridine derivatives. Examples are nicotine, nornicotine, anabasine, myosmine and anatabine. Most of the known biological functions of alkaloids are related to protection.

[0003] Nicotine occurs naturally in several varieties of plant but is found at the highest level in the tobacco plant. It is produced in wild and cultivated Nicotiana species and it plays an important role in plant defence against herbivores and insects (Voelckel et al., 2001, incorporated herein by reference), accounting for ˜90% of the total alkaloid content. The remaining 10% of the alkaloid pool is mostly constituted by nornicotine, anatabine, myosmine and anabasine.

[0004] The regulation of alkaloid content in tobacco is complex. Several factors including genotype, environment, fertilization and agronomic practices (e.g. topping) affect alkaloid levels in tobacco plants.

[0005] In the 1930s, certain Cuban cigar tobacco (Nicotiana tabacum) types were identified as having very low alkaloid contents, and this trait was introduced into US tobacco breeding lines (Valleau 1949, incorporated herein by reference). The low-alkaloid trait was subsequently incorporated into the genetic background of cultivar Burley 21 (B21) through multiple generations of backcrosses (Legg et al., 1970, incorporated herein by reference).

[0006] Genetic studies using low-alkaloid Burley 21 (LA-B21) suggested that two unlinked loci, initially referred to as locus A and B (Legg et al., 1969, incorporated by reference), but later known as Nic1 and Nic2, contribute to the nicotine levels in tobacco leaf as regulatory loci for nicotine biosynthesis (Legg and Collins 1971, incorporated by reference; Hibi et al., 1994, incorporated by reference). LA B21 was reported to be more susceptible to insect damage, in line with the role of alkaloids in plant defence. It has also been reported that isogenic lines of flue-cured tobacco with low total alkaloids (around 0.2%) have lower yield. By means of haploid doubling of F₁ progeny from the cross between the wild type or high alkaloid B21 (HA-B21, AABB)×LA-B21 (aabb), Collins et al., (1974, incorporated by reference) developed another two isogenic lines (NILs) of B21 with high intermediate alkaloid (HI-B21, AAbb) and low intermediate (LI-B21, aaBB), which were later registered as varieties in 1988 (Nielsen et al., 1988 incorporated by reference). The near isogenic lines (NILs) are referred to herein as Burley 21 (B21, Nic1Nic2), High Intermediate (HI, Nic1nic2), Low Intermediate (LI, nic1Nic2) and Low Alkaloid B21 (LA, nic1nic2) were later registered as varieties in 1988.

[0007] Down regulation of nicotine biosynthesis genes in the nic mutants has been confirmed by various research (Hibi et al., 1994; Reed and Jelesko 2004 both incorporated herein by reference) and it is suggested that Nic1 and Nic2 are the regulatory loci that specifically control the expression of nicotine-related structural genes. Subsequent studies have shown that these two loci also control the expression of numerous genes unrelated to nicotine biosynthesis, such as stress response genes (Kidd et al. 2006 incorporated by reference).

[0008] Microarray analysis of HA-B21 and LA-B21 led to identification of a cluster of ERF (ethylene response factor) genes regulating nicotine biosynthesis at the Nic2 locus (Shoji et al., 2010, incorporated herein by reference). In the nic2 mutant lines, such as LA-B21 and HI-B21, these ERF genes are deleted altogether. Recent studies have confirmed that the Nic2 region contains a cluster of ERF genes and is located on chromosome 19 (Kajikawa et al. 2017, incorporated herein by reference).

[0009] Elucidation of the location of the Nic1 locus in tobacco has proven difficult, due to the complex nature of quantitative traits such as alkaloid levels inhibiting map-based cloning approaches. For the first time Humphry et al., demonstrated in WO2018/237107 (incorporated herein by reference) that a Nic1 locus located on chromosome 7 contains a number of homeologs of the Nic2 ERF genes, and showed that these Nic1 ERF genes function in regulating nicotine levels suggesting that Nic1 may regulate nicotine biosynthesis in a similar manner to Nic2.

[0010] Modifying alkaloid content in plants (e.g. tobacco) can have several commercial advantages. For example, decreasing total alkaloid content in plants can increase the value of said plant as a biomass resource. For example, modifying alkaloid content may comprise reducing the alkaloid content e.g. nicotine content of tobacco plants. Tobacco plants and products with reduced nicotine may be desirable in view of the potential regulation of “nicotine ceilings” i.e. average upper limits of nicotine in delivery systems. Alternatively, increasing alkaloid content in plants e.g. tobacco plants, can help to protect plants against insects and herbivores. There remains a need for plants with modulated alkaloid content, for example with modulated nicotine content, with improved commercially desirable traits and methods for making the same.

[0011] Tobacco pyridine alkaloids are precursors of tobacco-specific nitrosamines (TSNAs) that form during the post-harvest leaf curing. The four primary TSNAs found in cured tobacco leaves are N′-nitrosonornicotine (NNN), N′nitrosoanatabine (NAT), N′-nitrosoanabasine (NAB) and 4-(methyl nitrosamino)-1-(3-pyridyl)-1-butanone (NNK).

[0012] TSNAs form when nitrous oxide species (e.g. NO, NO₂, N₂O₃ and N₂O₄) react with tobacco alkaloids. NAT and NAB are formed via the nitrosation of the secondary alkaloids anatabine and anabasine, respectively. Although early studies claimed that NNN originates from both nicotine and nornicotine, more recent reports have demonstrated that the occurrence of NNN in cured tobacco leaves is correlated with nornicotine content, not nicotine (Bush et al., Rec. Adv. Tob. Sci. 27; 23-46 (2001); Lewis et al., Plant Biotech J. 6: 346-354 (2008) both incorporated herein by reference). Nornicotine is the demethylated derivative of nicotine, the major alkaloid in tobacco accounting for 90% of the total alkaloid content (Saitoh et al., 1985 Phytochemistry, 24 pp. 477-480, incorporated herein by reference). The precursor/product relationship of NNK formation is less clear. Some studies state that NNK is a nitrosation product of nicotine, but due to the slow reaction rate of nicotine nitrosation, it is likely that an oxidized derivative(s) of nicotine, rather than nicotine itself serves as the direct precursor of NNK (Caldwell et al Ann. N.Y. Acad. Sci. 686,213-228 (1993) incorporated herein by reference). Identifying the genes responsible of the production and regulation of the TSNA precursors is of high importance.

[0013] Although nornicotine typically accounts for only 2-4% of the total pyridine alkaloid content in tobacco plants, the genetic instability that leads to the spontaneous appearance of high nornicotine-containing converter plants is a chronic problem in delivery systemion. Maintaining low nornicotine levels may prevent the objectionable flavour and aroma associated with this alkaloid, as well as reducing the formation of N-nitrosonornicotine (NNN) in delivery systems, of which nornicotine is the direct precursor.

[0014] The gene responsible for the majority of the nicotine to nornicotine conversion is a nicotine demethylase gene CYP82E4, encoding a cytochrome P450 monooxygenase (Siminszky et al., Proc. Natl. Acad. Sci. USA, 102 (2005), pp. 14919-14924; Xu et al., Physiol. Plantarum, 129 (2007), pp. 307-319, both incorporated herein by reference). The nicotine demethylase gene family in tobacco is extensively characterised, but little is known about other cell processes that can influence nornicotine levels.

[0015] There still exists a great need to devise methodologies that can further reduce the levels of TSNAs in tobacco plants and products produced from tobacco plants.

[0016] As described in the Examples, the inventors sought to investigate genes responsible for alkaloid synthesis, with the aim of modulating alkaloid content in plants, e.g. decreasing nicotine content in tobacco plants.

[0017] A flue-cured tobacco variety (FC101) containing nic1 and nic2, was found to have lower than expected nicotine levels, based on these two loci alone. It was hypothesized that a third locus, Nic3, was controlling the reduced nicotine levels in this variety.

[0018] Their research prompted the present inventors to create a population segregating for Nic3, generated from a cross between FC101 (nic1 nic2 nic3) and LAFC53 (nic1 nic2 Nic3). The alkaloid content of the resulting F₂ plants was analysed. SNP genotyping was performed on Fes to identify polymorphic markers for further analysis. The inventors developed markers which segregate with the Nic3 locus. New potential regulators of alkaloid synthesis genes were identified.

### SUMMARY OF THE INVENTION

[0019] It has been surprisingly found that by modulating the activity or expression of a gene in a Nic3 locus as taught herein, the alkaloid content (e.g. nicotine content) of tobacco plants can be modulated. Thereby delivery systems with modulated alkaloid content and commercially desirable traits sought after by consumers of delivery systems can be produced. In some instances, consumers may desire a product with low levels of alkaloid content e.g. low levels of nicotine content.

[0020] The present invention may be particularly useful in the field of plant molecular farming, where plants, or parts thereof or plant cells (such as tobacco and other Nicotiana spp.) are used for the production of proteins, peptides, and metabolites e.g. for the production of therapeutics and pharmaceuticals such as antibiotics, virus like particles, or neutraceuticals or small molecules. Tobacco has been used for the development of an HIV-neutralising antibody in an EU-funded project called PharmPlant and Medicago Inc., Canada have worked on a tobacco-based platform for the production of virus-like particles for flu vaccine manufacture.

[0021] In other instances it may be desirable to produce plants with high alkaloid levels e.g. high levels of nicotine content so that nicotine may be purified from the tobacco plant to produce a pure nicotine product for example for use in devices which utilize liquid containing nicotine (e.g. e-cigarettes) or within tobacco heating devices. For example, the production of plants with leaves containing high levels of nicotine could reduce costs of nicotine extraction for the production of e-liquids for e-cigarettes.

[0022] The present inventors investigated the regulation of nicotine biosynthesis in tobacco plants. They identified and investigated a new locus, referred to herein as the Nic3 locus. In addition to the regulatory loci Nic1 and Nic2, it is hypothesised that Nic3 controls the expression of nicotine-related structural genes (and possibly other unrelated genes). One aim of the inventors was to provide altered alkaloid content and in particular, reduced nicotine content. Genes were identified in the Nic3 region which unexpectedly modulated alkaloid content in modified tobacco plants compared to their wild-type plant counterparts grown under the same conditions. In particular, the present inventors have identified a Nic3 locus (and Nic3 genes) which are capable of further reducing alkaloid (e.g. nicotine content) and TSNA precursor content in a nic1 nic2 background (i.e. in plants which already have low alkaloid e.g. low nicotine).

[0023] The present inventors have surprisingly determined a method for modulating the alkaloid content, e.g. nicotine content, of a tobacco plant or part thereof or plant cell by modulating the activity or expression of a Nic3 gene and/or providing a mutation in a Nic3 locus. Prior to the present invention it had not been known that a third locus—“Nic3” as described herein could be used to modulate alkaloid content alone or in combination with the Nic1 and/or Nic2 loci.

[0024] The present inventors have determined that the modulation of a Nic3 locus can reduce the alkaloid content (e.g. nicotine content) and/or TSNA precursor or TSNA content of the modified plant.

[0025] In particular, the present inventors have determined that modulation of a Nic1 locus, a Nic2 locus and a Nic3 locus (such as mutation of genes within said loci) provides a plant having surprisingly low alkaloid content (e.g. low nicotine content) and/or low TSNA precursor or low TSNA content.

[0026] In one aspect, the present invention provides a method of modulating (e.g. decreasing) the alkaloid content (e.g. nicotine content) of a tobacco plant or a part thereof, or tobacco plant cell, the method comprising modifying said plant or cell by modulating the activity or expression of at least one Nic3 gene from Table 3 or a sequence which has at least 90% identity thereto or a functional variant or functional fragment or orthologue of said gene.

[0027] Suitably, in any aspect of the present invention, the activity or expression of at least one Nic3 gene selected from SEQ ID No. 73, SEQ ID No. 76, SEQ ID No. 79, SEQ ID No. 82, SEQ ID No. 85, SEQ ID No. 88, SEQ ID No. 91, SEQ ID No. 94, SEQ ID No. 97, SEQ ID No. 100, SEQ ID No. 103, SEQ ID No. 106, SEQ ID No. 109, SEQ ID No. 112, SEQ ID No. 115, SEQ ID No. 118, SEQ ID No. 121, SEQ ID No. 124, SEQ ID No. 127, SEQ ID No. 130, SEQ ID No. 133, SEQ ID No. 136, SEQ ID No. 139, SEQ ID No. 142, SEQ ID No. 145, SEQ ID No. 148 or SEQ ID No. 151 may be modulated. Suitably, the activity or expression of at least one Nic3 gene selected from SEQ ID No. 73, 118, 124 or 127 may be modulated (e.g. decreased or increased).

[0028] Suitably, the activity or expression of at least one gene selected from SEQ ID No. 73, SEQ ID No. 76 or SEQ ID No. 79 may be modulated (e.g. decreased or increased).

[0029] In another aspect, the present invention provides a method of modulating (e.g. decreasing) the alkaloid content (e.g. nicotine content) of a tobacco plant or a part thereof, or tobacco plant cell, the method comprising modifying said plant or part thereof, or cell by: introducing at least one mutation to a Nic3 locus (e.g. in a Nic3 gene), and optionally at least one mutation to a Nic1 locus (e.g. in a Nic1 ERF gene) and/or at least one mutation to a Nic2 locus (e.g. in a Nic2 ERF gene). Suitably, in any aspect of the present invention, the Nic3 gene may be selected from SEQ ID No. 73, SEQ ID No. 76, SEQ ID No. 79, SEQ ID No. 82, SEQ ID No. 85, SEQ ID No. 88, SEQ ID No. 91, SEQ ID No. 94, SEQ ID No. 97, SEQ ID No. 100, SEQ ID No. 103, SEQ ID No. 106, SEQ ID No. 109, SEQ ID No. 112, SEQ ID No. 115, SEQ ID No. 118, SEQ ID No. 121, SEQ ID No. 124, SEQ ID No. 127, SEQ ID No. 130, SEQ ID No. 133, SEQ ID No. 136, SEQ ID No. 139, SEQ ID No. 142, SEQ ID No. 145, SEQ ID No. 148 or SEQ ID No. 151.

[0030] Suitably, the activity or expression of at least one gene selected from SEQ ID No. 73, 118, 124 or 127 may be modulated (e.g. decreased or increased). Suitably, the activity or expression of at least one gene selected from SEQ ID No. 73, SEQ ID No. 76 or SEQ ID No. 79 may be modulated (e.g. decreased or increased).

[0031] In one aspect, the present invention provides a method of modulating (e.g. decreasing) the alkaloid content (e.g. nicotine content) of a tobacco plant or a part thereof, or tobacco plant cell, the method comprising modifying said plant or cell by modulating the activity or expression of:
[0032] a) at least one Nic3 gene;
[0033] and optionally
[0034] b) at least one Nic1 ERF gene; and/or
[0035] c) at least one Nic2 ERF gene.

[0036] In such methods the activity or expression of at least one Nic3 gene is modified, and optionally, in addition, the activity or expression of at least one Nic1 ERF and/or Nic2 ERF gene may be modified. The term “optionally” as used herein requires that the features that follow are optional only, i.e. may or may not be present. The term “and/or” as used herein allows for the presence of one or both of the features preceding and following that term. In this aspect this therefore covers the alternatives of modifying: i) at least one Nic3 gene; ii) at least one Nic3 gene and at least one Nic1 ERF gene; iii) at least one Nic3 gene and at least one Nic2 ERF gene; and iv) at least one Nic3 gene, at least one Nic1 ERF gene and at least one Nic2 ERF gene. Suitably in option i) there are no modifications in the Nic1 ERF or Nic2 ERF genes. Such options similarly apply to other methods, uses and products described herein in which such modification is contemplated.

[0037] In another aspect, the present invention provides a method of modulating (e.g. decreasing) the alkaloid content (e.g. nicotine content) of a tobacco plant or a part thereof, or tobacco plant cell, the method comprising modifying said plant or part thereof, or cell by: introducing at least one mutation to a Nic3 locus (e.g. in a Nic3 gene), and optionally at least one mutation to a Nic1 locus (e.g. in a Nic1 ERF gene) and/or at least one mutation to a Nic2 locus (e.g. in a Nic2 ERF gene). In such methods at least one mutation is introduced to a Nic3 locus, and optionally, in addition, at least one mutation is introduced to a Nic1 locus and/or a Nic2 locus. This therefore covers the alternatives of introducing: i) at least one mutation to a Nic3 locus; ii) at least one mutation to a Nic3 locus and at least one mutation to a Nic1 locus; iii) at least one mutation to a Nic3 locus and at least one mutation to a Nic2 locus; and iv) at least one mutation to a Nic3 locus, at least one mutation to a Nic1 locus and at least one mutation to a Nic2 locus. Suitably in option i) no mutations are introduced to the Nic1 locus or Nic2 locus. Such options similarly apply to other methods, uses and products described herein in which such mutation is contemplated.

[0038] In a further aspect, the present invention provides a method of modulating (e.g. decreasing) the content of a tobacco specific nitrosamine (TSNA) precursor in a tobacco plant or plant part thereof, or tobacco plant cell, the method comprising modifying said plant or cell by:
[0039] i) modulating the activity or expression of:
   [0040] a) at least one Nic3 gene; and optionally
   [0041] b) at least one Nic1 ERF gene; and/or
   [0042] c) at least one Nic2 ERF gene; or
[0043] ii) introducing at least one mutation to a Nic3 locus (e.g. in a Nic3 gene), and optionally at least one mutation to a Nic1 locus (e.g. in a Nic1 ERF gene) and/or at least one mutation to a Nic2 locus (e.g. in a Nic2 ERF gene).

[0044] In a further aspect, the present invention provides the use of:
[0045] a) at least one Nic3 gene, and optionally at least one Nic1 ERF gene and/or at least one Nic2 ERF gene; or
[0046] b) at least one mutation in a Nic3 locus (e.g. in a Nic3 gene), and optionally at least one mutation in a Nic1 locus (e.g. in a Nic1 ERF gene) and/or at least one mutation in a Nic2 locus (e.g. in a Nic2 ERF gene);
[0047] for modulating (e.g. decreasing) alkaloid content (e.g. nicotine content) and or TSNA precursor content of a tobacco plant or part thereof or tobacco plant cell.

[0048] In another aspect, the present invention provides a method for producing a plant or part thereof, a tobacco plant cell, a tobacco plant propagation material, a tobacco leaf, a cut harvested tobacco leaf, a processed tobacco leaf or a cut and processed tobacco leaf which has modulated (e.g. decreased) alkaloid content (e.g. nicotine content), the method comprising modifying said tobacco plant or part thereof or tobacco cell to:
[0049] i) modulate the activity or expression of:
[0050] a) at least one Nic3 gene; and optionally
[0051] b) at least one Nic1 ERF gene; and/or
[0052] c) at least one Nic2 ERF gene; or
[0053] ii) introduce at least one mutation in a Nic3 locus (e.g. in a Nic3 gene), and optionally at least one mutation in a Nic1 locus (e.g. in a Nic1 ERF gene) and/or at least one mutation in a Nic2 locus (e.g. in a Nic2 ERF gene).

[0054] Suitably, in any aspect of the present invention, the nicotine content may be decreased in comparison to a tobacco plant or part thereof or tobacco cell which has not been modified to introduce at least one mutation to a Nic3 locus, and optionally at least one mutation to a Nic1 locus and/or at least one mutation to a Nic2 locus.

[0055] In another aspect, the present invention provides a tobacco plant or part thereof or tobacco cell which has been modified to achieve a reduction in alkaloid content (e.g. nicotine content) in comparison to an unmodified tobacco plant or part thereof or tobacco cell, wherein said modification comprises:
[0056] i) modulated activity of or expression of:
[0057] a) at least one Nic3 gene; and optionally
[0058] b) at least one Nic1 ERF gene; and/or
[0059] c) at least one Nic2 ERF gene; or
[0060] ii) at least one mutation in a Nic3 locus (e.g. in a Nic3 gene), and optionally at least one mutation in a Nic1 locus (e.g. in a Nic1 gene) and/or at least one mutation in a Nic2 locus (e.g. in a Nic2 ERF gene).

[0061] In a further aspect, the present invention provides a tobacco plant propagation material obtainable from a tobacco plant or part thereof or tobacco cell according to the present invention or from a tobacco plant or part thereof or tobacco cell produced by a method according to the present invention.

[0062] Suitably, in any aspect of the present invention (such as a method or use according to the present invention, a plant or part thereof or cell according to the present invention, or a plant propagation material according to the present invention):
[0063] a) the activity or expression of a Nic3 gene selected from those listed in Table 3 or a sequence which has at least 90% identity thereto or a functional variant or functional fragment or orthologue of said gene may be modulated; or said at least one mutation in the Nic3 locus may be in a Nic3 gene selected from those listed in Table 3 or a sequence which has at least 90% identity thereto or a functional variant or functional fragment or orthologue of said gene:
[0064] b) the activity or expression of a Nic1 ERF gene selected from those listed in Table 1 may be modulated; or said at least one mutation in the Nic1 locus may be in a Nic1 ERF gene selected from:
[0065] SEQ ID No. 8; or SEQ ID No. 12; or SEQ ID No. 16; or SEQ ID No. 20; or SEQ ID No. 24; or SEQ ID No. 28; or SEQ ID No. 32; or a sequence which has at least 90% identity thereto, or a functional variant or functional fragment or orthologue of said gene; and/or

[0066] c) the activity or expression of a Nic2 ERF gene selected from those listed in Table 2 may be modulated; or said at least one mutation in the Nic2 locus is may be a Nic2 ERF gene selected from: SEQ ID No. 69; SEQ ID No. 37; or SEQ ID No. 41; or SEQ ID No. 45; or SEQ ID No. 49; or SEQ ID No. 53; or SEQ ID No. 57; or SEQ ID No. 61; or SEQ ID No. 65; or a sequence which has at least 90% identity thereto or a functional variant or functional fragment or orthologue of said gene. Suitably, a Nic3 gene selected from those listed in Table 3 is selected from SEQ ID No. 73, 118, 124 or 127 or a sequence which has at least 90% identity thereto or a functional variant or functional fragment or orthologue of said gene, and the at least one mutation in the Nic3 locus is in a Nic3 gene selected from SEQ ID No. 73, 118, 124 or 127 or a sequence which has at least 90% identity thereto or a functional variant or functional fragment or orthologue of said gene.

[0067] Suitably, in any aspect of the present invention (such as a method or use according to the present invention, a plant or part thereof according to the present invention, or a plant propagation material according to the present invention):
[0068] i) the activity or expression of SEQ ID No. 8 may be modulated (e.g. decreased or increased); or said at least one mutation in the Nic1 locus may be in SEQ ID No. 8;
[0069] and/or
[0070] ii) the activity or expression of SEQ ID No. 69 may be modulated (e.g. decreased or increased); or said at least one mutation in the Nic2 locus may be in SEQ ID No. 69.

[0071] Suitably, in any aspect of the present invention (such as a method or use according to the present invention, a plant or part thereof according to the present invention, or a plant propagation material according to the present invention) said at least one mutation in the Nic3 locus may be in a Nic3 gene selected from Table 3, or a sequence which has at least 90% identity thereto or a functional variant or functional fragment or orthologue of said gene.

[0072] Suitably, said at least one mutation in the Nic3 gene is selected from:

[0073] i) a mutation in the Nic3 gene SEQ ID No. 73 or a sequence which has at least 90% identity thereto or a functional variant or functional fragment or orthologue of said gene that results in a mutation in amino acid residues 74 to 258 or 483-538 of SEQ ID No. 75 or a sequence which has at least 90% identity thereto, or a functional variant or functional fragment or orthologue of said polypeptide;

[0074] ii) a mutation in the Nic3 gene SEQ ID No. 118 or a sequence which has at least 90% identity thereto or a functional variant or functional fragment or orthologue of said gene that results in a mutation in amino acid residues 120-584 of SEQ ID No. 120 or a sequence which has at least 90% identity thereto, or a functional variant or functional fragment or orthologue of said polypeptide;

[0075] iii) a mutation in the Nic3 gene SEQ ID No. 124 or a sequence which has at least 90% identity thereto or a functional variant or functional fragment or orthologue of said gene that results in a mutation in amino acid residues 166-406 or 483-970 of SEQ ID No. 126 or a sequence which has at least 90% identity thereto, or a functional variant or functional fragment or orthologue of said polypeptide; and

[0076] iv) a mutation in the Nic3 gene SEQ ID No. 127 or a sequence which has at least 90% identity thereto or a functional variant or functional fragment or orthologue of said gene that results in a mutation in amino acid residues 171-406 or 509-967 of SEQ ID No. 129 or a sequence which has at least 90% identity thereto, or a functional variant or functional fragment or orthologue of said polypeptide.

[0077] In one aspect, the present invention provides the use of a plant or part thereof or plant cell according to the present invention, or of a plant produced by a method according to the present invention to breed a plant.

[0078] In one aspect, the present invention provides the use of a plant or part thereof or plant cell according to the present invention, or of a plant produced by a method according to the present invention for production of a product.

[0079] In one aspect, the present invention provides the use of a plant or part thereof or plant cell according to the present invention, or of a plant produced by a method according to the present invention to grow a crop.

[0080] In one aspect, the present invention provides the use of a plant or part thereof according to the present invention, or of a plant produced by a method according to the present invention to produce a leaf.

[0081] In a further aspect, the present invention provides a harvested leaf of a plant according to the present invention, or obtainable from a plant propagated from a propagation material according to the present invention, or obtainable from a plant obtained by a use according to the present invention, or obtainable from a plant produced by a method according to the present invention. The harvested leaf may be green leaf, such as green fresh leaf, or a dried leaf.

[0082] Suitably, the harvested leaf according to the present invention may be a cut harvested leaf.

[0083] In another aspect, the present invention provides a processed leaf, preferably a processed tobacco leaf, preferably a non-viable processed tobacco leaf:
[0084] obtainable (e.g. obtained) from a plant obtainable from a use according to the present invention;
[0085] obtainable (e.g. obtained) by processing a plant according to the present invention;
[0086] obtainable (e.g. obtained) from a plant propagated from a plant propagation material according to the present invention; or
[0087] obtainable (e.g. obtained) by processing a harvested leaf of a plant according to the present invention; or
[0088] obtainable (e.g. obtained) from a plant produced by a method according to the present invention.

[0089] Suitably, a processed leaf according to the present invention may be processed by curing, fermenting, pasteurising or a combination thereof, preferably wherein the content of one or more TSNAs selected from N′-nitrosonornicotine (NNN), 4-(methylnitrosamino)-1-(3-pyridyl)-1-butanone (NNK), N′-nitrosoanatabine (NAT) and N-nitrosoanabasine (NAB) is decreased, wherein preferably the content of NNN and/or NNK is modulated (e.g. decreased), wherein more preferably the content of NNN is decreased.

[0090] Suitably, a processed leaf according to the present invention may be a cut processed leaf.

[0091] In a further aspect, the present invention provides cured tobacco material made from a plant or a part thereof:
[0092] obtainable (e.g. obtained) from a plant obtainable from a use according to the present invention;
[0093] obtainable (e.g. obtained) by processing a plant according to the present invention;
[0094] obtainable (e.g. obtained) from a plant propagated from a plant propagation material according to the present invention; or
[0095] obtainable (e.g. obtained) by processing a harvested leaf of a plant according to the present invention; or
[0096] obtainable from a plant produced by a method according to the present invention.

[0097] Suitably, the cured tobacco material, tobacco blend or delivery system, may comprise an average alkaloid level or average nicotine level of about 0.01%, 0.02%, 0.05%, 0.0.75%. 0.1%, 0.2%, 0.3%, 0.5%, 0.6%, 0.7%, 0.8%, 0.9%, 1.0%, 1.1%, 1.2%, 1.3%, 1.4%, 1.5%, 1.6%, 1.7%, 1.8%, 1.9%, 2.0%, 2.1%, 2.2%, 2.3%, 2.4%, 2.5%, 2.6%, 2.7%, 2.8%, 2.9%, 3%, 4% or 5% on a dry weight basis. Suitably, the cured tobacco material may comprise an average alkaloid level or average nicotine level of less than 5%, less, than 4%, less than 3%, less than 2%, less than 1%, less than 0.9%, less than 0.8%, less than 0.7%, less than 0.6%, less than 0.5%, less than 0.4%, less than 0.3%, less than 0.2%, less than 0.1%, less than 0.075%, less than 0.05%, less than 0.02% or less than 0.01%.

[0098] In another aspect, the present invention provides a tobacco blend comprising cured tobacco material according to the present invention.

[0099] In a further aspect, the present invention provides a delivery system prepared from:
[0100] a tobacco plant according to the present invention, or a part thereof;
[0101] a tobacco plant or part thereof propagated from a tobacco plant propagation material according to the present invention;
[0102] a harvested leaf of a plant according to the present invention;
[0103] a processed leaf according to the present invention;
[0104] or
[0105] a plant produced by a method according to the present invention.

[0106] Suitably, a delivery system according to the present invention may be a combustible smoking article.

[0107] Suitably, a delivery system according to the present invention may be a smokeless delivery system.

[0108] Suitably, a delivery system according to the present invention may be a non-combustible aerosol provision system such as a tobacco heating device or an aerosol-generating device.

[0109] In a further aspect, the present invention provides a combustible smoking article, non-combustible aerosol provisioning system, smokeless delivery system or tobacco heating device comprising a plant or a part thereof according to the present invention or an extract (e.g. a tobacco extract) thereof; or a cured tobacco material according to the present invention; or a tobacco blend according to the present invention.

[0110] In another aspect, the present invention provides the use of a nucleotide sequence of a Nic3 locus (e.g. a Nic3 gene from Table 3 or selected from a gene with SEQ ID No. 73, 118, 124 or 127, or a sequence which has at least 90% identity thereto or a functional variant or functional fragment or orthologue of said gene), and optionally a Nic1 locus (e.g. a Nic1 ERF gene) and/or a Nic2 locus (e.g. a Nic2 ERF gene), to select a plant having reduced alkaloid content (e.g. nicotine content) and/or reduced content of tobacco specific nitrosamine (TSNA) or a precursor of a TSNA. Suitably, said nucleotide sequence may comprise a mutation.

[0111] In a further aspect, the present invention provides a mutant of a plant carrying at least one heritable mutation in a Nic3 locus (e.g. in a Nic3 gene from Table 3, or selected from a gene with SEQ ID No. 73, 118, 124 or 127 or a sequence which has at least 90% identity thereto or a functional variant or functional fragment or orthologue of said gene), and optionally at least one heritable mutation in a Nic1 locus (e.g. in a Nic1 ERF gene) and/or at least one heritable mutation in a Nic2 locus (e.g. in a Nic2 ERF gene); wherein said heritable mutations decrease the alkaloid content (e.g. nicotine content), and/or decrease the content of a tobacco specific nitrosamine (TSNA) or a precursor of a TSNA in the mutant tobacco plant relative to a comparable plant which does not carry said heritable mutations.

[0112] In a further aspect, the present invention provides progeny or seed of a mutant plant which carries the heritable mutation according to the present invention.

[0113] In another aspect, the present invention provides a harvested leaf, a processed leaf or cured tobacco material produced from a plant comprising at least one mutation in a Nic3 locus (e.g. in a Nic3 gene from Table 3, or selected from a gene with SEQ ID No. 73, 118, 124 or 127 or a sequence which has at least 90% identity thereto or a functional variant or functional fragment or orthologue of said gene), and optionally at least one mutation in a Nic1 locus (e.g. in a Nic1 ERF gene) and/or at least one mutation in a Nic2 locus (e.g. in a Nic2 ERF gene) and wherein said plant has decreased nicotine content and/or decreased content of a tobacco specific nitrosamine (TSNA) or a precursor of a TSNA relative to a comparable plant which does not carry said mutations in a Nic3 locus, and optionally a Nic1 locus and/or a Nic2 locus.

### BRIEF DESCRIPTION OF THE DRAWINGS

[0114] Embodiments of the invention will now be described, by way of example only, with reference to the accompanying drawings, in which:

[0115] FIG. 1 shows the nicotine and nornicotine content for FC101 and LAFC53. Asterisks indicate significant difference to FC101 (p-value <0.01)

[0116] FIG. 2 shows the nicotine and nornicotine content for an F2 population between FC101 and LAFC53. (A) Nicotine content, (B) Nornicotine content.

[0117] FIG. 3 shows nicotine quantitative trait locus (QTL) analysis results for chromosome 5 in an F2 population from FC101×LAFC53.

[0118] FIG. 4 shows nicotine and nornicotine content in an F2 population from FC101×LAFC53 segregating for marker Nt2AG2015.

[0119] FIGS. 5 to 8 show SEQ ID No. 571 to SEQ ID No. 574 which provide the TRV2 sequences for gene silencing genes with SEQ ID Nos: 73, 118, 124 and 127 in which the gene specific sequences are shown in bold and underlined.

[0120] FIG. 9 shows that virus-induced gene silencing of genes in the Nic3 locus results in reduction of nicotine content compared to nic1nic2.

### SEQUENCE LISTING

[0121] A summary of sequence identifiers used throughout the subject specification and the corresponding sequence listing is provided wherein:

TABLE 1
The Nic1 locus/Nic1 ERF genes comprise:

| | | Genomic | | | Amino acid |
|---|---|---|---|---|---|
| Identifier | Gene | sequence | cDNA | CDS | sequence |
| Nitab4.5_0003090g0020.1 | ERF17L3ΔN | SEQ ID | SEQ ID | SEQ ID | SEQ ID |
| | | No. 1 | No. 2 | No. 3 | No. 4 |
| Nitab4.5_0003090g0030.1 | ERF199 | SEQ ID | SEQ ID | SEQ ID | SEQ ID |
| | | No. 5 | No. 6 | No. 7 | No. 8 |
| Nitab4.5_0003665g0040.1 | JRE5L2 | SEQ ID | SEQ ID | SEQ ID | SEQ ID |
| | | No. 9 | No. 10 | No. 11 | No. 12 |
| Nitab4.5_0004620g0010.1 | ERF210 | SEQ ID | SEQ ID | SEQ ID | SEQ ID |
| | | No. 13 | No. 14 | No. 15 | No. 16 |
| Nitab4.5_0004620g0030.1 | ERF91 | SEQ ID | SEQ ID | SEQ ID | SEQ ID |
| | | No. 17 | No. 18 | No. 19 | No. 20 |
| Nitab4.5_0004620g0080.1 | ERF29 | SEQ ID | SEQ ID | SEQ ID | SEQ ID |
| | | No. 21 | No. 22 | No. 23 | No. 24 |
| Nitab4.5_0004620g0090.3 | ERF130 | SEQ ID | SEQ ID | SEQ ID | SEQ ID |
| | | No. 25 | No. 26 | No. 27 | No. 28 |
| Nitab4.5_0004620g0095.1 | ERF16 | SEQ ID | SEQ ID | SEQ ID | SEQ ID |
| | | No. 29 | No. 30 | No. 31 | No. 32 |
| Nitab4.5_0006382g0040.1 | ERF110 | SEQ ID | SEQ ID | SEQ ID | SEQ ID |
| | | No. 33 | No. 34 | No. 35 | No. 36 |

TABLE 2
The Nic 2 locus/Nic2 ERFs comprise:

| | | Genomic | | | Amino acid |
|---|---|---|---|---|---|
| Identifier | Gene | sequence | cDNA | CDS | sequence |
| Nitab4.5_0002924g0010.1 | ERF17LI | SEQ ID | SEQ ID | SEQ ID | SEQ ID |
| | | No. 37 | No. 38 | No. 39 | No. 40 |
| Nitab4.5_0002924g0020.2 | ERF179 | SEQ ID | SEQ ID | SEQ ID | SEQ ID |
| | | No. 41 | No. 42 | No. 43 | No. 44 |
| Nitab4.5_0002924g0040.2 | ERF17 | SEQ ID | SEQ ID | SEQ ID | SEQ ID |
| | | No. 45 | No. 46 | No. 47 | No. 48 |
| Nitab4.5_0002924g0045.1 | ERF168 | SEQ ID | SEQ ID | SEQ ID | SEQ ID |
| | | No. 49 | No. 50 | No. 51 | No. 52 |
| Nitab4.5_0002924g0050.2 | ERF115 | SEQ ID | SEQ ID | SEQ ID | SEQ ID |
| | | No. 53 | No. 54 | No. 55 | No. 56 |
| Nitab4.5_0006499g0010.1 | ERF104 | SEQ ID | SEQ ID | SEQ ID | SEQ ID |
| | | No. 57 | No. 58 | No. 59 | No. 60 |
| Nitab4.5_0006499g0020.2 | ERF221 | SEQ ID | SEQ ID | SEQ ID | SEQ ID |
| | | No. 61 | No. 62 | No. 63 | No. 64 |
| Nitab4.5_0012667g0020.2 | ERF91L1 | SEQ ID | SEQ ID | SEQ ID | SEQ ID |
| | | No. 65 | No. 66 | No. 67 | No. 68 |
| Nitab4.5_0015055g0010.2 | ERF189 | SEQ ID | SEQ ID | SEQ ID | SEQ ID |
| | | No. 69 | No. 70 | No. 71 | No. 72 |

TABLE 3
The Nic3 locus/Nic3 genes sequences comprise:

| | | Genomic | | Amino acid |
|---|---|---|---|---|
| Identifier | Predicted function | sequence | CDS | sequence |
| Nitab4.5_0002539g0040.2 | Myc-type, basic helix-loop-helix (bHLH) | SEQ ID | SEQ ID | SEQ ID |
| | domain, Transcription factor MYC/MYB N- | No. 73 | No. 74 | No. 75 |
| | terminal (MYC2a) | | | |
| Nitab4.5_0002683g0020.2 | ERF | SEQ ID | SEQ ID | SEQ ID |
| | | No. 76 | No. 77 | No. 78 |
| Nitab4.5_0002778g0050.2 | Plastid-lipid associated protein PAP/fibrillin | SEQ ID | SEQ ID | SEQ ID |
| | family protein | No. 79 | No. 80 | No. 81 |
| Nitab4.5_0004551g0030.2 | Myb TF | SEQ ID | SEQ ID | SEQ ID |
| | | No. 82 | No. 83 | No. 84 |
| Nitab4.5_0000535g0120.2 | NAC domain protein: involved in plant | SEQ ID | SEQ ID | SEQ ID |
| | hormonal control and defence. DNA-binding | No. 85 | No. 86 | No. 87 |
| | domain (DBD) and a dimerization domain | | | |
| Nitab4.5_0005226g0010.2 | Cytochrome P450 | SEQ ID | SEQ ID | SEQ ID |
| | | No. 88 | No. 89 | No. 90 |
| Nitab4.5_0009200g0010.2 | Cytochrome P450 | SEQ ID | SEQ ID | SEQ ID |
| | | No. 91 | No. 92 | No. 93 |
| Nitab4.5_0004528g0040.2 | BZIP transcription factor family protein | SEQ ID | SEQ ID | SEQ ID |
| | | No. 94 | No. 95 | No. 96 |
| Nitab4.5_0000556g0220.2 | Myb family transcription factor family | SEQ ID | SEQ ID | SEQ ID |
| | protein | No. 97 | No. 98 | No. 99 |
| Nitab4.5_0006594g0090.2 | Myb Transcription factor | SEQ ID | SEQ ID | SEQ ID |
| | | No. 100 | No. 101 | No. 102 |
| Nitab4.5_0006594g0030.2 | GATA transcription factor | SEQ ID | SEQ ID | SEQ ID |
| | | No. 103 | No. 104 | No. 105 |
| Nitab4.5_0006594g0020.2 | Transferase | SEQ ID | SEQ ID | SEQ ID |
| | | No. 106 | No. 107 | No. 108 |
| Nitab4.5_0006594g0050.2 | Nuclear RNA binding protein-like | SEQ ID | SEQ ID | SEQ ID |
| | | No. 109 | No. 110 | No. 111 |
| Nitab4.5_0002683g0040.2 | NB-ARC domain, Disease resistance protein | SEQ ID | SEQ ID | SEQ ID |
| | | No. 112 | No. 113 | No. 114 |
| Nitab4.5_0002683g0070.2/ | Aminotransferase | SEQ ID | SEQ ID | SEQ ID |
| Nitab05g026600.2.2 | | No. 115 | No. 116 | No. 117 |
| Nitab4.5_0002683g0080.2 | LRR, Disease resistance protein | SEQ ID | SEQ ID | SEQ ID |
| | | No. 118 | No. 119 | No. 120 |
| Nitab4.5_0006415g0030.2 | LRR, Disease resistance protein | SEQ ID | SEQ ID | SEQ ID |
| | | No. 121 | No. 122 | No. 123 |
| Nitab4.5_0005412g0010.2 | NB-ARC, Disease resistance protein | SEQ ID | SEQ ID | SEQ ID |
| | | No. 124 | No. 125 | No. 126 |
| Nitab4.5_0005412g0020.2 | NB-ARC, Disease resistance protein | SEQ ID | SEQ ID | SEQ ID |
| | | No. 127 | No. 128 | No. 129 |
| Nitab4.5_0000712g0030.2 | Transcriptional regulation, Homeobox- | SEQ ID | SEQ ID | SEQ ID |
| | leucine zipper family protein | No. 130 | No. 131 | No. 132 |
| Nitab4.5_0000712g0010.2 | Myb family transcription factor family | SEQ ID | SEQ ID | SEQ ID |
| | protein | No. 133 | No. 134 | No. 135 |
| Nitab4.5_0000712g0020.2 | Myb | SEQ ID | SEQ ID | SEQ ID |
| | | No. 136 | No. 137 | No. 138 |
| Nitab4.5_0000712g0040.2 | Myb family transcription factor family | SEQ ID | SEQ ID | SEQ ID |
| | protein | No. 139 | No. 140 | No. 141 |
| Nitab4.5_0022887g0010.2 | Metabolite exporter, WAT1-related protein | SEQ ID | SEQ ID | SEQ ID |
| | | No. 142 | No. 143 | No. 144 |
| Nitab4.5_0000712g0270.2 | Nitrate transporter | SEQ ID | SEQ ID | SEQ ID |
| | | No. 145 | No. 146 | No. 147 |
| Nitab4.5_0008372g0010.2 | Nitrate transporter | SEQ ID | SEQ ID | SEQ ID |
| | | No. 148 | No. 149 | No. 150 |
| Nitab4.5_0012102g0010.2 | Nitrate transporter | SEQ ID | SEQ ID | SEQ ID |
| | | No. 151 | No. 152 | No. 153 |
| Nitab4.5_0007629g0040.2 | Arf gtpase-activating protein | SEQ ID | SEQ ID | SEQ ID |
| | | No. 154 | No. 155 | No. 156 |
| Nitab4.5_0007629g0030.2 | Ubiquitin carboxyl-terminal hydrolase-like | SEQ ID | SEQ ID | SEQ ID |
| | protein | No. 157 | No. 158 | No. 159 |
| Nitab4.5_0008566g0040.2 | Ankyrin repeat-containing protein | SEQ ID | SEQ ID | SEQ ID |
| | | No. 160 | No. 161 | No. 162 |
| Nitab4.5_0002539g0020.2 | CAAX protease self-immunity protein | SEQ ID | SEQ ID | SEQ ID |
| | | No. 163 | No. 164 | No. 165 |
| Nitab4.5_0008566g0030.2 | MLH1 | SEQ ID | SEQ ID | SEQ ID |
| | | No. 166 | No. 167 | No. 168 |
| Nitab4.5_0008650g0030.2 | AT hook motif DNA-binding family protein | SEQ ID | SEQ ID | SEQ ID |
| | | No. 169 | No. 170 | No. 171 |
| Nitab4.5_0008566g0080.2 | PLATZ transcription factor family protein | SEQ ID | SEQ ID | SEQ ID |
| | | No. 172 | No. 173 | No. 174 |
| Nitab4.5_0008650g0010.2 | AT hook motif DNA-binding family protein | SEQ ID | SEQ ID | SEQ ID |
| | | No. 175 | No. 176 | No. 177 |
| Nitab05g026010.1.2 | F-box protein interaction domain protein | SEQ ID | SEQ ID | SEQ ID |
| | | No. 178 | No. 179 | No. 180 |
| Nitab4.5_0008650g0020.2 | AP-2 complex subunit mu | SEQ ID | SEQ ID | SEQ ID |
| | | No. 181 | No. 182 | No. 183 |
| Nitab4.5_0004551g0020.2 | Zinc finger, RING-type domain | SEQ ID | SEQ ID | SEQ ID |
| | | No. 184 | No. 185 | No. 186 |
| Nitab4.5_0000535g0050.2 | Leucine-rich repeat-containing protein | SEQ ID | SEQ ID | SEQ ID |
| | | No. 187 | No. 188 | No. 189 |
| Nitab4.5_0004551g0010.2 | Cinnamoyl-CoA reductase | SEQ ID | SEQ ID | SEQ ID |
| | | No. 190 | No. 191 | No. 192 |
| Nitab4.5_0000535g0020.2 | RING/U-box superfamily protein isoform 1 | SEQ ID | SEQ ID | SEQ ID |
| | | No. 193 | No. 194 | No. 195 |
| Nitab4.5_0000535g0030.2 | aluminum activated malate transporter | SEQ ID | SEQ ID | SEQ ID |
| | family protein | No. 196 | No. 197 | No. 198 |
| Nitab4.5_0000535g0010.2 | ABC transporter family protein | SEQ ID | SEQ ID | SEQ ID |
| | | No. 199 | No. 200 | No. 201 |
| Nitab4.5_0010737g0010.2 | Inositol-tetrakisphosphate 1-kinase | SEQ ID | SEQ ID | SEQ ID |
| | | No. 202 | No. 203 | No. 204 |
| Nitab4.5_0000535g0040.2 | Protein phosphatase 2c | SEQ ID | SEQ ID | SEQ ID |
| | | No. 205 | No. 206 | No. 207 |
| Nitab4.5_0010978g0020.2 | E3 ubiquitin-protein ligase RNF14 | SEQ ID | SEQ ID | SEQ ID |
| | | No. 208 | No. 209 | No. 210 |
| Nitab4.5_0000535g0100.2 | Phosphatase 2C family protein | SEQ ID | SEQ ID | SEQ ID |
| | | No. 211 | No. 212 | No. 213 |
| Nitab4.5_0010978g0010.2 | Pentatricopeptide repeat protein | SEQ ID | SEQ ID | SEQ ID |
| | | No. 214 | No. 215 | No. 216 |
| Nitab4.5_0000535g0110.2 | Protein phosphatase 2c | SEQ ID | SEQ ID | SEQ ID |
| | | No. 217 | No. 218 | No. 219 |
| Nitab4.5_0002778g0010.2 | Heat shock transcription factor | SEQ ID | SEQ ID | SEQ ID |
| | | No. 220 | No. 221 | No. 222 |
| Nitab4.5_0002778g0020.2 | Pre-mRNA-splicing factor CWC22 | SEQ ID | SEQ ID | SEQ ID |
| | | No. 223 | No. 224 | No. 225 |
| Nitab4.5_0002778g0030.2 | Syntaxin-like protein | SEQ ID | SEQ ID | SEQ ID |
| | | No. 226 | No. 227 | No. 228 |
| Nitab4.5_0006398g0040.2 | Glycine cleavage system h protein | SEQ ID | SEQ ID | SEQ ID |
| | | No. 229 | No. 230 | No. 231 |
| Nitab05g025900.1.2 | Replication factor-A carboxy- | SEQ ID | SEQ ID | SEQ ID |
| | terminal domain protein | No. 232 | No. 233 | No. 234 |
| Nitab4.5_0006398g0030.2 | Peptide transporter | SEQ ID | SEQ ID | SEQ ID |
| | | No. 235 | No. 236 | No. 237 |
| Nitab4.5_0002778g0070.2 | Dolichol phosphate-mannose | SEQ ID | SEQ ID | SEQ ID |
| | biosynthesis regulatory protein | No. 238 | No. 239 | No. 240 |
| Nitab4.5_0006398g0030.1/ | Peptide transporter | SEQ ID | SEQ ID | SEQ ID |
| Nitab05g026330.2.2 | | No. 241 | No. 242 | No. 243 |
| Nitab4.5_0006398g0010.2 | Type 1 inositol-1 | SEQ ID | SEQ ID | SEQ ID |
| | | No. 244 | No. 245 | No. 246 |
| Nitab4.5_0002778g0040.2 | GRIP/coiled-coil protein, | SEQ ID | SEQ ID | SEQ ID |
| | putative (DUF1664) | No. 247 | No. 248 | No. 249 |
| Nitab4.5_0010461g0020.2 | Expansin-like protein | SEQ ID | SEQ ID | SEQ ID |
| | | No. 250 | No. 251 | No. 252 |
| Nitab4.5_0002778g0080.2 | Lysine-specific demethylase | SEQ ID | SEQ ID | SEQ ID |
| | | No. 253 | No. 254 | No. 255 |
| Nitab4.5_0010461g0010.2 | Haloacid dehalogenase-like | SEQ ID | SEQ ID | SEQ ID |
| | hydrolase family protein | No. 256 | No. 257 | No. 258 |
| Nitab4.5_0005487g0030.2/ | Regulator of nonsense | SEQ ID | SEQ ID | SEQ ID |
| Nitab05g026390.1.2 | transcripts 1-like protein | No. 259 | No. 260 | No. 261 |
| Nitab4.5_0008709g0020.2 | Regulator of nonsense | SEQ ID | SEQ ID | SEQ ID |
| | transcripts 1 | No. 262 | No. 263 | No. 264 |
| Nitab4.5_0008709g0030.2 | SBP (S-ribonuclease binding | SEQ ID | SEQ ID | SEQ ID |
| | protein) family protein | No. 265 | No. 266 | No. 267 |
| Nitab4.5_0008709g0010.2 | Beta-amylase | SEQ ID | SEQ ID | SEQ ID |
| | | No. 268 | No. 269 | No. 270 |
| Nitab4.5_0008425g0020.2 | 60S ribosomal protein L37a | SEQ ID | SEQ ID | SEQ ID |
| | | No. 271 | No. 272 | No. 273 |
| Nitab4.5_0004528g0020.2 | Cellulose synthase | SEQ ID | SEQ ID | SEQ ID |
| | | No. 274 | No. 275 | No. 276 |
| Nitab4.5_0008425g0040.2 | Calcineurin B-like protein | SEQ ID | SEQ ID | SEQ ID |
| | | No. 277 | No. 278 | No. 279 |
| Nitab4.5_0004528g0030.2 | Dolichyl-diphosphooligosaccharide-protein | SEQ ID | SEQ ID | SEQ ID |
| | glycosyltransferase subunit DAD1 | No. 280 | No. 281 | No. 282 |
| Nitab4.5_0008425g0010.2 | AUGMIN subunit 2 | SEQ ID | SEQ ID | SEQ ID |
| | | No. 283 | No. 284 | No. 285 |
| Nitab4.5_0004528g0010.2 | Biotin/lipoate A/B protein ligase family | SEQ ID | SEQ ID | SEQ ID |
| | | No. 286 | No. 287 | No. 288 |
| Nitab4.5_0008425g0030.2 | Protein kinase | SEQ ID | SEQ ID | SEQ ID |
| | | No. 289 | No. 290 | No. 291 |
| Nitab05g026480.2.2 | Bifunctional inhibitor/lipid-transfer | SEQ ID | SEQ ID | SEQ ID |
| | protein/seed storage 2S albumin superfamily | No. 292 | No. 293 | No. 294 |
| | protein | | | |
| Nitab4.5_0000556g0260.2 | Poly [ADP-ribose] polymerase | SEQ ID | SEQ ID | SEQ ID |
| | | No. 295 | No. 296 | No. 297 |

[0122] SEQ ID No. 298 corresponds to marker Nt1AG1750.

[0123] SEQ ID No. 299 corresponds to marker Nt1AC2307.

[0124] SEQ ID No. 300 is a forward primer for SNP3.

[0125] SEQ ID No. 301 is a reverse primer for SNP3.

[0126] SEQ ID No. 302 is a forward primer for SNP5.

[0127] SEQ ID No. 303 is a reverse primer for SNP5.

[0128] SEQ ID No. 304 is a forward primer for SNP15.

[0129] SEQ ID No. 305 is a reverse primer for SNP15.

[0130] SEQ ID No. 306 is a forward primer for SNP18.

[0131] SEQ ID No. 307 is a reverse primer for SNP18.

[0132] SEQ ID No. 308 is a forward primer for SNP19.

[0133] SEQ ID No. 309 is a reverse primer for SNP19.

[0134] SEQ ID No. 310 corresponds to marker Nt2AG2015.

[0135] SEQ ID No. 311 corresponds to marker Nt1AG1750.

[0136] SEQ ID No. 312 corresponds to marker Nt1AC2307.

[0137] SEQ ID Nos. 313-569 are the sequences of the SNPs associated with the QTL identified in the Examples.

[0138] SEQ ID No. 570 is the TRV RNA1 used in Example 7.

[0139] SEQ ID No. 571-574 are the TRV RNA2 sequences used in Example 7.

[0140] Some sequences disclosed herein contain “N” in nucleotide sequences. “N” can be any nucleotide or a deletion or insertion of one or more nucleotides. For example, in some cases a string of “N”s are shown. The number of “N”s does not necessarily correlate with the actual number of nucleotides at that position. There may be more or fewer nucleotides than shown as “N” in the sequence.

### DETAILED DESCRIPTION

[0141] For the first time the present inventors have identified the Nic3 locus, which regulates nicotine biosynthesis in tobacco.

[0142] By modulating the activity or expression of at least one Nic3 gene in a plant (e.g. a tobacco plant) or part thereof or tobacco cell, the alkaloid and/or TSNA content of the plant may be modulated (e.g. reduced). The alkaloid (e.g. nicotine) content of a plant or part thereof of plant cell may be modulated (e.g. reduced) by introducing a mutation to the Nic3 locus.

[0143] As used herein, “Nic3” locus refers to any chromosomal position or location within or closely linked to the Nic3 region.

[0144] “Nic3 region” refers to a chromosomal segment subtended by the markers Nt1AG1750 (SEQ ID No. 298) and Nt1AC2307 (SEQ ID No. 299), corresponding to 206 cM to 398 cM shown in FIG. 3, and having allele(s) associated with a low alkaloid (low-nicotine) trait.

[0145] A “Nic3 mutation” refers to a mutation in a Nic3 locus.

[0146] As used herein, a “Nic3 gene” refers to a gene at or near a Nic3 locus and includes for example, the genes listed in Table 3; or a sequence which has at least 80% identity thereto (at least 85%, at least 90%, at least 95%, at least 97%, at least 98%, at least 99% identity thereto), or a functional variant or functional fragment or orthologue of said gene.

[0147] Suitably, a Nic3 gene may be selected from: SEQ ID No. 73, SEQ ID No. 76, SEQ ID No. 79, SEQ ID No. 82, SEQ ID No. 85, SEQ ID No. 88, SEQ ID No. 91, SEQ ID No. 94, SEQ ID No. 97, SEQ ID No. 100, SEQ ID No. 103, SEQ ID No. 106, SEQ ID No. 109, SEQ ID No. 112, SEQ ID No. 115, SEQ ID No. 118, SEQ ID No. 121, SEQ ID No. 124, SEQ ID No. 127, SEQ ID No. 130, SEQ ID No. 133, SEQ ID No. 136, SEQ ID No. 139, SEQ ID No. 142, SEQ ID No. 145, SEQ ID No. 148 or SEQ ID No. 151; or a sequence which has at least 80% identity thereto (at least 85%, at least 90%, at least 95%, at least 97%, at least 98%, at least 99% identity thereto), or a functional variant or functional fragment or orthologue of said gene.

[0148] Suitably, the Nic3 gene may selected from SEQ ID No. 73, SEQ ID No. 76 or SEQ ID No. 79; or a sequence which has at least 80% identity thereto (at least 85%, at least 90%, at least 95%, at least 97%, at least 98%, at least 99% identity thereto), or a functional variant or functional fragment or orthologue of said gene. Suitably the Nic3 gene may be selected from SEQ ID No. 73, SEQ ID No. 118, SEQ ID No. 124 or SEQ ID No. 127; or a sequence which has at least 80% identity thereto (at least 85%, at least 90%, at least 95%, at least 97%, at least 98%, at least 99% identity thereto), or a functional variant or functional fragment or orthologue of said gene.

[0149] In another aspect, a Nic3 locus comprises a sequence or a chromosomal segment within 50, 100, 200, 300, 400, 500, 6000, 700, 800, 900, 1000, 1500, 2000, 3000, 4000, 5000, 6000, 7000, 8000, 9000, 10000, 15000, 20000, 30000 40000, 50000, 60000, 70000 nucleotides of a sequence selected from the group consisting of SEQ ID No. 73, SEQ ID No. 76, SEQ ID No. 79, SEQ ID No. 82, SEQ ID No. 85, SEQ ID No. 88, SEQ ID No. 91, SEQ ID No. 94, SEQ ID No. 97, SEQ ID No. 100, SEQ ID No. 103, SEQ ID No. 106, SEQ ID No. 109, SEQ ID No. 112, SEQ ID No. 115, SEQ ID No. 118, SEQ ID No. 121, SEQ ID No. 124, SEQ ID No. 127, SEQ ID No. 130, SEQ ID No. 133, SEQ ID No. 136, SEQ ID No. 139, SEQ ID No. 142, SEQ ID No. 145, SEQ ID No. 148 and SEQ ID No. 151 (suitably from the group consisting of SEQ ID No. 73, SEQ ID No. 118, SEQ ID No. 124 and SEQ ID No. 127).

[0150] In one aspect, the Nic3 gene is SEQ ID No. 73, SEQ ID No. 118, SEQ ID No. 124 or SEQ ID No. 127; or a sequence which has at least 80% identity thereto (at least 85%, at least 90%, at least 95%, at least 97%, at least 98%, at least 99% identity thereto), or a functional variant or functional fragment or orthologue of said gene.

[0151] Suitably, the Nic3 gene may encode a polypeptide comprising an amino acid sequence set forth in Table 3; or a sequence which has at least 80% identity thereto (at least 85%, at least 90%, at least 95%, at least 97%, at least 98%, at least 99% identity thereto), or a functional variant or functional fragment or orthologue of said polypeptide.

[0152] Suitably, the Nic3 gene may encode a polypeptide selected from: SEQ ID No. 75, SEQ ID No. 78, SEQ ID No. 81, SEQ ID No. 84, SEQ ID No. 87, SEQ ID No. 90, SEQ ID No. 93, SEQ ID No. 96, SEQ ID No. 99, SEQ ID No. 102, SEQ ID No. 105, SEQ ID No. 108, SEQ ID No. 111, SEQ ID No. 114, SEQ ID No. 117, SEQ ID No. 120, SEQ ID No. 123, SEQ ID No. 126, SEQ ID No. 129, SEQ ID No. 132, SEQ ID No. 135, SEQ ID No. 138, SEQ ID No. 141, SEQ ID No. 144, SEQ ID No. 147, SEQ ID No. 150 or SEQ ID No. 153; or a sequence which has at least 80% identity thereto (at least 85%, at least 90%, at least 95%, at least 97%, at least 98%, at least 99% identity thereto), or a functional variant or functional fragment or orthologue of said polypeptide.

[0153] Suitably, the Nic3 gene may encode a polypeptide selected from: SEQ ID No. 75, SEQ ID No. 78 or SEQ ID No. 81; or a sequence which has at least 80% identity thereto (at least 85%, at least 90%, at least 95%, at least 97%, at least 98%, at least 99% identity thereto), or a functional variant or functional fragment or orthologue of said polypeptide.

[0154] In one aspect, the Nic3 gene encodes a polypeptide comprising the amino acid sequence SEQ ID No. 75, SEQ ID No. 120, SEQ ID No. 126 or SEQ ID No. 129; or a sequence which has at least 80% identity thereto (at least 85%, at least 90%, at least 95%, at least 97%, at least 98%, at least 99% identity thereto), or a functional variant or functional fragment or orthologue of said polypeptide.

[0155] In one aspect a Nic3 locus comprises one or more sequences selected from Table 3.

[0156] In one aspect a Nic3 locus comprises one or more sequences selected from the group consisting of: SEQ ID No. 73, SEQ ID No. 76, SEQ ID No. 79, SEQ ID No. 82, SEQ ID No. 85, SEQ ID No. 88, SEQ ID No. 91, SEQ ID No. 94, SEQ ID No. 97, SEQ ID No. 100, SEQ ID No. 103, SEQ ID No. 106, SEQ ID No. 109, SEQ ID No. 112, SEQ ID No. 115, SEQ ID No. 118, SEQ ID No. 121, SEQ ID No. 124, SEQ ID No. 127, SEQ ID No. 130, SEQ ID No. 133, SEQ ID No. 136, SEQ ID No. 139, SEQ ID No. 142, SEQ ID No. 145, SEQ ID No. 148 or SEQ ID No. 151, or a sequence which has at least 80% identity thereto (at least 85%, at least 90%, at least 95%, at least 97%, at least 98%, at least 99% identity thereto), or a functional variant or functional fragment or orthologue of said gene.

[0157] Suitably, a Nic3 locus may comprise one or more sequences selected from the group consisting of SEQ ID No. 73, SEQ ID No. 76 and SEQ ID No. 79 or a sequence which has at least 80% identity thereto (at least 85%, at least 90%, at least 95%, at least 97%, at least 98%, at least 99% identity thereto), or a functional variant or functional fragment or orthologue of said gene.

[0158] In one aspect, a Nic3 locus comprises at least one or more of SEQ ID No. 73, SEQ ID No. 118, SEQ ID No. 124 or SEQ ID No. 127 or a sequence which has at least 80% identity thereto (at least 85%, at least 90%, at least 95%, at least 97%, at least 98%, at least 99% identity thereto), or a functional variant or functional fragment or orthologue of said gene.

[0159] As used herein “closely linked to” or “associated with” means that the marker or locus is within about 20 cM, 1 ocM, 5 cM, 1 cM, 0.5 cM or less than 0.5 cM of another marker or locus. For example, 10 cM means that the recombination between the marker and the locus with a frequency of equal to or less than about 10%.

[0160] As used herein, centimorgan (cM) refers to a unit of measure of recombination frequency. A cM is equivalent to a 1% chance that a marker at one genetic locus will be separated from a marker at a second locus due to crossing over in a single generation. Methods for calculating genetic distances from recombination values using the Kosambi function are known in the art, for example in Kosambi, (Annals of Eugenics, 12:172-175 (1944), which is incorporated herein by reference). As used herein, “Nic1” locus refers to any chromosomal position or location within or closely linked to the Nic1 region.

[0161] “Nic1 region” refers to a chromosomal segment as disclosed in WO2018/237107 (incorporated herein by reference) for example, a chromosomal segment subtended by the markers SNP3 and SNP5 Nt1AB6591 and Nt1AA9777), and having allele(s) associated with a low alkaloid (low-nicotine) trait. A forward primer for SNP3 is SEQ ID No. 300; a reverse primer for SNP3 is SEQ ID No. 301. A forward primer for SNP5 is SEQ ID No. 302; a reverse primer for SNP5 is SEQ ID No. 303.

[0162] A “Nic1 mutation” refers to a mutation in a Nic1 locus.

[0163] In one aspect a Nic1 locus comprises one or more sequences selected from Table 1.

[0164] In one aspect a Nic1 locus comprises one or more sequences selected from the group consisting of: SEQ ID No. 5, SEQ ID No. 1, SEQ ID No. 9, SEQ ID No. 13, SEQ ID No. 17, SEQ ID No. 21, SEQ ID No. 25, SEQ ID No. 29, or SEQ ID No. 33, or a sequence which has at least 80% identity thereto (at least 85%, at least 90%, at least 95%, at least 97%, at least 98%, at least 99% identity thereto), or a functional variant or functional fragment or orthologue of said gene.

[0165] In one aspect, a Nic1 locus comprises at least SEQ ID No. 8 or a sequence which has at least 80% identity thereto (at least 85%, at least 90%, at least 95%, at least 97%, at least 98%, at least 99% identity thereto), or a functional variant or functional fragment or orthologue of said gene.

[0166] In another aspect, a Nic1 locus comprises a sequence or a chromosomal segment within 50, 100, 200, 300, 400, 500, 6000, 700, 800, 900, 1000, 1500, 2000, 3000, 4000, 5000, 6000, 7000, 8000, 9000, 10000, 15000, 20000, 30000 40000, 50000, 60000, 70000 nucleotides of a sequence selected from the group consisting of SEQ ID No. 5, SEQ ID No. 1, SEQ ID No. 9, SEQ ID No. 13, SEQ ID No. 17, SEQ ID No. 21, SEQ ID No. 25, SEQ ID No. 29, and SEQ ID No. 33.

[0167] As used herein, a “Nic1 gene” refers to a gene at or near a Nic1 locus and includes for example, the genes listed in Table 1; or a sequence which has at least 80% identity thereto (at least 85%, at least 90%, at least 95%, at least 97%, at least 98%, at least 99% identity thereto), or a functional variant or functional fragment or orthologue of said gene.

[0168] The at least one Nic1 ERF gene may be selected from the group comprising: a gene which encodes a polypeptide which comprises an amino acid sequence as set out in: SEQ ID No. 8; or SEQ ID No. 12; or SEQ ID No. 16; or SEQ ID No. 20; or SEQ ID No. 24; or SEQ ID No. 28; or SEQ ID No. 32 or a functional variant or functional fragment or orthologue thereof; or wherein the ERF gene comprises a nucleotide sequence as set out in: SEQ ID No. 5; or SEQ ID No. 9; or SEQ ID No. 13; or SEQ ID No. 17; or SEQ ID No. 21; or SEQ ID No. 25; or SEQ ID No. 29; or a functional variant or functional fragment or orthologue thereof.

[0169] Suitably, the at least one Nic1 ERF gene may be one, or two, or three, or four, or five, or six or seven genes selected from the group comprising: a gene which encodes a polypeptide which comprises an amino acid sequence as set out in: SEQ ID No. 8; or SEQ ID No. 12; or SEQ ID No. 16; or SEQ ID No. 20; or SEQ ID No. 24; or SEQ ID No. 28; or SEQ ID No. 32 or a functional variant or functional fragment or orthologue thereof; or wherein the ERF gene comprises a nucleotide sequence as set out in: SEQ ID No. 5; or SEQ ID No. 9; or SEQ ID No. 13; or SEQ ID No. 17; or SEQ ID No. 21; or SEQ ID No. 25; or SEQ ID No. 29; or a functional variant or functional fragment or orthologue thereof.

[0170] In one aspect, the at least one Nic1 ERF gene encodes a polypeptide which comprises an amino acid sequence as set out in: SEQ ID No. 8 or a functional variant or functional fragment or orthologue thereof; or wherein the Nic1 ERF gene comprises a nucleotide sequence as set out in SEQ ID No. 5 or a functional variant or functional fragment or orthologue thereof.

[0171] In one aspect, the activity or expression of at least one additional Nic1 ERF is modulated. Suitably, at least two, at least three, at least four, at least five, at least six, at least seven or at least eight additional Nic1 ERFs selected from Table 1 may also be modulated.

[0172] In one aspect, the at least one Nic1 ERF gene encodes a polypeptide which comprises an amino acid sequence as set out in: SEQ ID No. 8 or a functional variant or functional fragment or orthologue thereof; or the at least one Nic1 ERF gene comprises a nucleotide sequence as set out in SEQ ID No. 5 or a functional variant or functional fragment or orthologue thereof is modulated; and the activity or expression of at least one additional Nic1 ERF is modulated.

[0173] Suitably, the at least one additional Nic1 ERF may be selected from: a Nic1 ERF gene which encodes a polypeptide which comprises an amino acid sequence as set out in: SEQ ID No. 4; or SEQ ID No. 12; or SEQ ID No. 16; or SEQ ID No. 20; or SEQ ID No. 24; or SEQ ID No. 28; or SEQ ID No. 32; or SEQ ID No. 36 or a functional variant or functional fragment or orthologue thereof; or wherein the ERF gene comprises a nucleotide sequence as set out in: SEQ ID No. 1; SEQ ID No. 3, or SEQ ID No. 9; or SEQ ID No. 13; or SEQ ID No. 17; or SEQ ID No. 21; or SEQ ID No. 25; or SEQ ID No. 29; or SEQ ID No. 33 or a functional variant or functional fragment or orthologue thereof. Suitably, at least two, at least three, at least four, at least five, at least six, at least seven or at least eight additional Nic1 ERFs may be modulated.

[0174] As used herein, “Nic2” locus refers to any chromosomal position or location within or closely linked to the Nic2 region.

[0175] “Nic2 region” refers to a chromosomal segment as disclosed in WO2018/237107 (incorporated herein by reference), for example a chromosomal segment delimited by the markers SNP15 and SNP18/19 and having allele(s) associated with a low alkaloid (low-nicotine) trait. A forward primer for SNP15 is SEQ ID No. 304; a reverse primer for SNP15 is SEQ ID No. 305. A forward primer for SNP18 is SEQ ID No. 306; a reverse primer for SNP18 is SEQ ID No. 307. A forward primer for SNP19 is SEQ ID No. 308; a reverse primer for SNP19 is SEQ ID No. 309.

[0176] A “Nic2 mutation” refers to a mutation in a Nic2 locus.

[0177] In one aspect a Nic1 locus comprises one or more sequences selected from Table 1.

[0178] In one aspect a Nic2 locus comprises one or more sequences selected from the group consisting of: SEQ ID No. 69, SEQ ID No. 37, SEQ ID No. 41, SEQ ID No. 45, SEQ ID No. 49, SEQ ID No. 3, SEQ ID No. 57, SEQ ID No. 61, or SEQ ID No. 65, or a sequence which has at least 80% identity thereto (at least 85%, at least 90%, at least 95%, at least 97%, at least 98%, at least 99% identity thereto), or a functional variant or functional fragment or orthologue of said gene.

[0179] In one aspect, a Nic2 locus comprises at least SEQ ID No. 69 or a sequence which has at least 80% identity thereto (at least 85%, at least 90%, at least 95%, at least 97%, at least 98%, at least 99% identity thereto), or a functional variant or functional fragment or orthologue of said gene.

[0180] In another aspect, a Nic2 locus comprises a sequence or a chromosomal segment within 50, 100, 200, 300, 400, 500, 6000, 700, 800, 900, 1000, 1500, 2000, 3000, 4000, 5000, 6000, 7000, 8000, 9000, 10000, 15000, 20000, 30000 40000, 50000, 60000, 70000 nucleotides of a sequence selected from the group consisting of SEQ ID No. 69, SEQ ID No. 37, SEQ ID No. 41, SEQ ID No. 45, SEQ ID No. 49, SEQ ID No. 3, SEQ ID No. 57, SEQ ID No. 61, and SEQ ID No. 65.

[0181] As used herein, a “Nic2 gene” refers to a gene at or near a Nic2 locus and includes for example, the genes listed in Table 2; or a sequence which has at least 80% identity thereto (at least 85%, at least 90%, at least 95%, at least 97%, at least 98%, at least 99% identity thereto), or a functional variant or functional fragment or orthologue of said gene.

[0182] The at least one Nic2 ERF gene may be selected from the group comprising: a gene which encodes a polypeptide which comprises an amino acid sequence as set out in: SEQ ID No. 72; or SEQ ID No. 40; or SEQ ID No. 44; or SEQ ID No. 48; or SEQ ID No. 52; or SEQ ID No. 56; or SEQ ID No. 60, SEQ ID No. 64 or SEQ ID No. 68 or a functional variant or functional fragment or orthologue thereof; or wherein the ERF gene comprises a nucleotide sequence as set out in: SEQ ID No. 69; or SEQ ID No. 37; or SEQ ID No. 41; or SEQ ID No. 45; or SEQ ID No. 49; or SEQ ID No. 53; or SEQ ID No. 57; SEQ ID No. 61; SEQ ID No. 65; or a functional variant or functional fragment or orthologue thereof.

[0183] Suitably, the at least one Nic2 ERF gene may be one, or two, or three, or four, or five, or six or seven, or either or nine genes selected from Table 2.

[0184] In one aspect, the at least one Nic2 ERF gene encodes a polypeptide which comprises an amino acid sequence as set out in: SEQ ID No. 72 or a functional variant or functional fragment or orthologue thereof; or wherein the Nic1 ERF gene comprises a nucleotide sequence as set out in SEQ ID No. 59 or a functional variant or functional fragment or orthologue thereof.

[0185] The term “modulating” is used herein to mean either increasing or decreasing.

[0186] The term “increasing alkaloid content” is used herein to mean that the concentration and/or total alkaloid content in the product of the present invention (e.g. plant, part thereof (e.g. leaf), processed leaf or a product made from the plant (e.g. a delivery system)) is higher compared with a comparable product which has not been modified in accordance with the present invention.

[0187] The term “decreasing alkaloid content” is used herein to mean that the concentration and/or total alkaloid content in the product of the present invention (e.g. plant, part thereof (e.g. leaf), processed leaf or a product made from the plant (e.g. a delivery system)) is lower compared with a comparable product which has not be modified in accordance with the present invention.

[0188] In one aspect, the tobacco plants or parts thereof or tobacco cells according to the present invention comprise a total alkaloid level of less than 3%, less than 2.75%, less than 2.5%, less than 2.25%, less than 2%, less than 1.75%, less than 1.5%, less than 1.25%, less than 1%, less than 0.9%, less than 0.8%, less than 0.7%, less than 0.6%, less than 0.5%, less than 0.4%, less than 0.3%, less than 0.2%, less than 0.1% or less than 0.05%.

[0189] In one aspect, the tobacco plants or parts thereof or tobacco cells according to the present invention comprise a nicotine level of less than 3%, less than 2.75%, less than 2.5%, less than 2.25%, less than 2%, less than 1.75%, less than 1.5%, less than 1.25%, less than 1%, less than 0.9%, less than 0.8%, less than 0.7%, less than 0.6%, less than 0.5%, less than 0.4%, less than 0.3%, less than 0.2%, less than 0.1% or less than 0.05%. In one aspect, the tobacco plants or parts thereof or tobacco cells according to the present invention comprise an alkaloid level or nicotine level of less than 1%, less than 2%, less than 5%, less than 10%, less than 15%, less than 20%, less than 25%, less than 30%, less than 40%, less than 50%, less than 60%, less than 70%, less than 80% of the alkaloid level or nicotine level of a comparable plant or part thereof or cell.

[0190] In one embodiment the present invention provides a method of modulating (e.g. reducing) the content of tobacco-specific nitrosamine (TSNA) or a precursor of a TSNA in a plant (e.g. a tobacco plant) or a part thereof, the method comprising modifying said plant by modulating the activity or expression of at least one Nic3 gene. Suitably, the method may comprise modulating (e.g. decreasing) the activity or expression of at least one Nic3 gene, and optionally at least one Nic1 ERF gene and/or at least one Nic2 ERF gene.

[0191] In one embodiment the TSNA is N′nitrosonornicotine (NNN) and/or the precursor is nornicotine.

[0192] In one embodiment the TSNA may be one or more of group selected from: N′-nitrosonornicotine (NNN), N′nitrosoanatabine (NAT), N′-nitrosoanabasine (NAB) and 4-(methyl nitrosamino)-1-(3-pyridyl)-1-butanone (NNK).

[0193] In a preferred embodiment the TSNA is N′-nitrosonornicotine (NNN).

[0194] The TSNA may be measured in a processed tobacco, e.g. cured tobacco or reconstituted tobacco. In one embodiment the TSNA content is measured and/or modified (e.g. reduced) in a cured tobacco plant or part thereof (e.g. in cured tobacco leaf).

[0195] The term “tobacco-specific nitrosamine” or “TSNA” as used herein has its usual meaning in the art, namely a nitrosamine which is found only in delivery systems or other nicotine-containing products. Suitably the at least one tobacco-specific nitrosamine may be N′-nitrosonornicotine (NNN), 4-(methylnitrosamino)-1-(3-pyridyl)-1-butanone (NNK), N′-nitrosoanatabine (NAT) or N-nitrosoanabasine (NAB).

[0196] The term “precursor thereto” when used in relation to at least one tobacco-specific nitrosamine refers to one or more chemicals or compounds of a tobacco plant that give rise to the formation of a tobacco-specific nitrosamine or are involved in the nitrosation reaction leading to tobacco-specific nitrosamine production.

[0197] In one embodiment the precursor of the TSNA is one or more of the group selected from nornicotine, anabasine, anatabine, and an oxidised derivative of nicotine such as pseudooxynicotine (PON).

[0198] In a preferred embodiment the precursor of the TSNA is nornicotine.

[0199] The precursor of the TSNA (e.g. NNN, NNK, NAB and/or NAT) may be measured in green tobacco leaf, e.g. prior to processing, e.g. prior to curing. In one embodiment, the precursor of the TSNA (e.g. NNN, NNK, NAB and/or NAT) is measured and/or reduced in a green tobacco leaf, e.g. prior to processing, e.g. prior to curing.

[0200] In one embodiment carrying out a method and or use of the invention results in a reduction of at least one TSNA or a precursor thereto in the modified tobacco plant (or part thereof) or tobacco cell when compared to a tobacco plant (or part thereof) which has not been modified in accordance with the present invention.

[0201] The terms “reducing at least one TSNA or precursor thereto” or “reduction of at least one TSNA or precursor thereto” are used herein to mean that the concentration and/or total content of the at least one TSNA or precursor thereto in the product, method or use of the invention is lower in relation to a comparable product, method or use. For example, a comparable delivery system would be derived from a tobacco plant which had not been modified according to the present invention, but in which all other relevant features were the same (e.g. plant species, growing conditions, method of processing tobacco, etc.).

[0202] Any method known in the art for determining the concentration and/or levels of at least one TSNA or precursor thereto may be used. In particular such a method may comprise the addition of deuterium labelled internal standard, an aqueous extraction and filtration, followed by analysis using reversed phase high performance liquid chromatography with tandem mass spectrometry (LC-MS/MS) may be used. Other examples for determining the concentration and/or level of a precursor to a tobacco-specific nitrosamine include a method such as the one detailed in CORESTA recommended method CRM-72: Determination of Tobacco Specific Nitrosamines in Tobacco and Delivery systems by LC-MS/MS; CRM being developed into ISO/DIS 21766 or Wagner et al. Analytical Chemistry (2005), 77(4), 1001-1006 all of which are incorporated herein by reference.

[0203] Suitably the concentration and/or total content of the at least one tobacco-specific nitrosamine or precursor thereto may be reduced by carrying out a method and/or use of the present invention.

[0204] Suitably the concentration and/or level of the at least one tobacco-specific nitrosamine or precursor thereto may be reduced in a tobacco plant of the invention (e.g. obtainable or obtained by a method and/or use of the invention) when compared to the concentration and/or level of the at least one tobacco-specific nitrosamine(s) or precursor thereto in a tobacco plant which has not been modified in accordance with present invention.

[0205] The concentration and/or total content of the at least one tobacco-specific nitrosamine(s) or precursor thereto may be reduced in a tobacco leaf, harvested leaf, processed tobacco leaf, delivery system or combinations thereof obtainable or obtained from a tobacco plant (or part of a tobacco plant or a tobacco cell culture) of the invention when compared with a tobacco leaf, harvested leaf, processed tobacco leaf, delivery system or combinations thereof obtainable or obtained from a tobacco plant (or part of a tobacco plant or a tobacco cell culture) which has not been modified in accordance with the present invention.

[0206] Suitably the concentration and/or total content of the at least one tobacco-specific nitrosamine or precursor thereto may be reduced in a processed tobacco leaf.

[0207] Suitably the concentration and/or level of the at least one tobacco-specific nitrosamine or precursor thereto may be reduced in a delivery system.

[0208] In one embodiment the at least one tobacco-specific nitrosamine or precursor thereto may be reduced by at least about 1%, at least about 3%, at least about 5%, at least about 10%, at least about 20%, at least about 30%, at least about 40%, at least about 50%, at least about 60%, at least about 70%, at least about 80% or at least about 90%. In some embodiments the at least one tobacco-specific nitrosamine or precursor thereto may be reduced by between about 5% and about 95%, by between about 10% and about 90%, by between 20% and about 80%, by between 30% and about 70%, or by between about 40% and 60%.

[0209] In relation to processed (e.g. cured) tobacco leaf (e.g. cured or reconstituted), the at least one tobacco-specific nitrosamine or precursor thereto may be reduced by between about 5000 ng/g and about 50 ng/g, by between about 4000 ng/g and about 100 ng/g, by between about 3000 ng/g and 500 ng/g or by between 2000 ng/g and 1000 ng/g. In some embodiments the at least one tobacco-specific nitrosamine or precursor thereto may be reduced by at least about 5000 ng/g, at least about 4000 ng/g, at least about 3000 ng/g, at least about 2000 ng/g, at least about 1000 ng/g, at least about 500 ng/g, at least about 100 ng/g or at least about 50 ng/g.

[0210] The term “a comparable product” as defined herein would be one derived from a plant (e.g. a tobacco plant) which had not been modified according to the present invention, but in which all other relevant features were the same (e.g. plant species, growing conditions, method of processing the plant, e.g. tobacco, etc.). The comparable product according to the present invention may mean a tobacco plant cell or a plant (e.g. a tobacco plant) or a part thereof, such as a leaf (e.g. a tobacco leaf), a harvested leaf (e.g. a harvested tobacco leaf), a cut harvested leaf (e.g. a cut harvested tobacco leaf), a processed leaf (e.g. a processed tobacco leaf) or plant propagation material (e.g. tobacco plant propagation material), or a product comprising said plant or part therefore, e.g. a delivery system or combinations thereof obtainable or obtained from a plant which has not been modified in accordance with the present invention, e.g. to modulate the activity or expression of a Nic3 gene (or a Nic3 gene in combination with one or more Nic1 ERF genes in combination with one or more Nic2 ERF genes). Comparable products may also be known as controls or as wild-type.

[0211] The term “unmodified plant” as defined herein would be a plant (e.g. a tobacco plant) which had not been modified according to the present invention, to modulate the activity or expression of a Nic3 gene and in which all other relevant features were the same (e.g. plant species, growing conditions, method of processing tobacco, etc.).

[0212] The “activity or expression” of a Nic3 gene (or a Nic1 ERF gene or Nic2 ERF gene) may refer to the level of transcription, translation i.e. protein expression, or the activity of the protein encoded by the Nic3 gene (or the Nic1 ERF or Nic2 ERF gene respectively). The activity of a Nic3 gene relates to its ability to function as a regulator of alkaloid biosynthesis and in particular nicotine biosynthesis. The activity of a Nic1 ERF gene (or a Nic2 ERF gene) relates to its ability to function as a transcription factor in the biosynthesis of alkaloids. The activity of a Nic3 gene (or a Nic1 ERF gene or a Nic2 ERF gene) may be determined by measuring the products of alkaloid synthesis i.e. by measuring alkaloid content.

[0213] According to one aspect of the invention, gene expression may be decreased (or inhibited) by inhibiting transcription and/or translation. In one embodiment the activity or expression of a gene may refer to the level of transcription, i.e. the amount of mRNA produced, or translation i.e. the level or amount of protein produced.

[0214] In some embodiments, the modulation of alkaloid content refers to an increase in alkaloid content wherein the activity or expression of at least one Nic3 gene is modulated.

[0215] In some embodiments, the modulation of alkaloid content refers to a decrease in alkaloid content wherein the activity or expression of at least one Nic3 gene is modulated.

[0216] In some embodiments, the modulation of alkaloid content refers to an increase in alkaloid content wherein the activity or expression of at least one Nic3 gene, and optionally the activity or expression of at least one Nic1 ERF gene and/or Nic2 ERF is modulated in combination.

[0217] In some embodiments, the modulation of alkaloid content refers to a decrease in alkaloid content wherein the activity or expression of at least one Nic3 gene, and optionally the activity or expression of at least one Nic1 ERF gene and/or Nic2 ERF is modulated in combination.

[0218] In a further aspect, the alkaloid content is measured from leaves. In one aspect the alkaloid content is measured from green leaves. In a further aspect, the alkaloid content is measured from cured leaves, e.g. air-cured, flue-cured, fire-cured or sun-cured leaves. In a further aspect, the alkaloid content is measured from flue-cured leaves. In a further aspect, the alkaloid content is measured from air-cured leaves.

[0219] The term “alkaloid content” is used herein to mean the concentration and/or total amount of the entire group of compounds classified as alkaloids. Alkaloids typically present in tobacco include nicotine, anatabine, anabasine, myosmine and nornicotine. In one embodiment the content of one or more alkaloids selected from nicotine, anatabine, anabasine, myosmine and nornicotine is modulated. In one embodiment the content of one or more alkaloids selected from nicotine, anatabine, anabasine, myosmine and nornicotine is reduced. In one embodiment the content of one or more alkaloids selected from nicotine, anatabine, anabasine and nornicotine is increased.

[0220] Suitably nicotine content is modulated. In one embodiment the nicotine content is reduced.

[0221] Any method known in the art for determining the concentration and/or total content of alkaloids may be used. One preferred method for analysing alkaloid content involves the analysis by gas chromatography-flame ionization detection method (GC-FID).

[0222] In one embodiment there is provided a method for producing a plant (e.g. a tobacco plant) or part thereof, a plant propagation material (e.g. a tobacco plant propagation material), a cell (e.g. a tobacco cell), a leaf (e.g. a tobacco leaf), a harvested leaf (e.g. a harvested tobacco leaf), a cut harvested leaf (e.g. a cut harvested tobacco leaf), a processed leaf (e.g. a processed tobacco leaf), a cut and processed leaf (e.g. a cut and processed tobacco leaf), a product comprising said plant or part thereof (e.g. a delivery system) or combinations thereof obtainable or obtained by a plant of the invention which has modulated alkaloid content, the method comprising modifying said tobacco to modulate the activity or expression of a Nic3 gene or the combination of a Nic3 gene and at least one Nic1 ERF gene and/or at least one Nic2 ERF gene. The modulated alkaloid content may be determined by comparing the alkaloid content in the plant (e.g. tobacco plant) or part thereof, plant propagation material (e.g. tobacco plant propagation material), a cell (e.g. a tobacco cell), leaf (e.g. tobacco leaf), harvested leaf (e.g. a harvested tobacco leaf), cut harvested leaf (e.g. a cut harvested tobacco leaf), processed leaf (e.g. processed tobacco leaf), cut and processed leaf (e.g. cut and processed tobacco leaf), a product comprising a plant or part thereof of the present invention, e.g. a delivery system, or combinations thereof with a comparable product.

[0223] Suitably the alkaloid content may be modulated in a plant, e.g. a tobacco plant e.g. modified tobacco plant. Suitably the alkaloid content may be modulated in a leaf (e.g. a tobacco leaf e.g. a tobacco leaf from a modified tobacco plant). Suitably the alkaloid content may be modulated in a harvested leaf (e.g. a harvested tobacco leaf from a modified tobacco plant). Suitably the alkaloid content may be modulated in a cut harvested leaf (e.g. a cut harvested tobacco leaf from a modified tobacco plant). Suitably the alkaloid content may be modulated in a processed leaf (e.g. a processed tobacco leaf e.g. a processed tobacco leaf from a modified tobacco plant). Suitably the alkaloid content may be modulated in a cut and processed leaf (e.g. a cut and processed tobacco leaf e.g. a cut and processed tobacco leaf from a modified tobacco plant). Suitably the alkaloid content may be modulated in a cured leaf (e.g. cured a tobacco leaf from a modified tobacco plant). Suitably the alkaloid content may be modulated in an extract of a green leaf (e.g. a green tobacco leaf from a modified tobacco plant). Suitably the alkaloid content may be modulated in a product comprising the plant of the present invention or part thereof (e.g. a delivery system, for example a delivery system produced from a modified tobacco plant or part thereof).

[0224] Suitably the alkaloid content may be modulated in any one of the above products or combinations thereof. Suitably the modulation of alkaloid content described above may be an increase in alkaloid content. Suitably the modulation of alkaloid content described above may be a decrease in alkaloid content.

[0225] In one embodiment the content of one or more alkaloids selected from nicotine, anatabine, anabasine, myosmine and nornicotine is decreased.

[0226] Suitably the modulation of alkaloid content described above may be a decrease in nicotine content.

[0227] In one embodiment the nicotine content of a modified tobacco cell, or modified plant or part thereof (e.g. tobacco plant), plant propagation material (e.g. tobacco plant propagation material), leaf (e.g. tobacco leaf), harvested leaf (e.g. harvested tobacco leaf), cut harvested leaf (e.g. cut harvested tobacco leaf), processed leaf (e.g. processed tobacco leaf), cut and processed leaf (e.g. cut and processed tobacco leaf) or delivery system from a modified tobacco plant is decreased.

[0228] In one embodiment the alkaloid content of a plant (e.g. tobacco plant) or part thereof may be modulated by at least 2, 3, 4, 5, 6, 7, 8, 9 or 10, fold when compared to the alkaloid content of a plant (e.g. tobacco plant) or part thereof, respectively, which has not been modified to modulate the activity or expression of at least one Nic3 gene (or at least one Nic3 gene in combination with at least one Nic1 ERF and/or at least one Nic2 ERF gene) which has been grown under similar growth conditions. Suitably the alkaloid content may be modulated (e.g. reduced) by about 2 fold to about 10 fold, preferably about 3 fold to about 10 fold, suitably about 3 fold to about 5 fold. Suitably the modification may be an increase or a decrease in alkaloid content. Suitably the modulation (e.g. reduction) may be of one or more alkaloids selected from nicotine, anatabine, anabasine, myosmine and nornicotine. Suitably, nicotine content is reduced.

[0229] In one embodiment of the invention the alkaloid content of a tobacco plant cell or plant (e.g. a tobacco plant) or part thereof may be modulated by 1%, 2%, 5%, 8%, 10%, 12%, 15%, 20%, 25%, 30%, 40%, 50%, 60%, 70%, 80% or 90% in comparison to a cell or plant (e.g. a tobacco plant) or part thereof which has not been modified according to the present invention. The modulation may be an increase or a decrease in alkaloid content when compared to an unmodified plant (e.g. a tobacco plant) or part thereof. Suitably the modulation may be of total alkaloid content. Suitably the modulation may be of one or more alkaloids selected from nicotine, anatabine, anabasine, myosmine and nornicotine. Suitably nicotine content is reduced.

[0230] In one embodiment the method or use results in modulated alkaloid content in comparison to a plant (e.g. a tobacco plant) or part thereof or cell which has not been modified to modulate the activity or expression of a Nic3 gene (or a combination of a Nic3 gene and a Nic1 ERF gene and/or a Nic2 ERF gene) and more particularly as compared to, or relative to, the expression by a plant (e.g. a tobacco plant) in the absence of the introduced modification.

[0231] In one embodiment the method or use results in modulated alkaloid content in comparison to a plant (e.g. a tobacco plant) or part thereof or cell which has not been modified to introduce a mutation to a Nic3 gene (or a combination of a Nic3 gene and a Nic1 ERF gene and/or a Nic2 ERF gene) and more particularly as compared to, or relative to, a plant (e.g. a tobacco plant) or part thereof or cell in the absence of the introduced modification.

[0232] In an embodiment a plant (e.g. a tobacco plant) or part thereof or cell has been modified to achieve a modulation in alkaloid content in comparison to a plant (e.g. a tobacco plant) or part thereof, respectively, which has not been modified to modulate the activity or expression of the at least one Nic3 gene (or at least one Nic3 gene and at least one Nic1 ERF gene and/or at least one Nic2 ERF gene). References herein to Nic3 and Nic1 and/or Nic2 (when referring to loci or genes) concern the options i) Nic3 and Nic1, ii) Nic3 and Nic 2, and iii) Nic3, Nic1 and Nic 2.

[0233] The term “modifying” or “modified” as used herein means a cell (e.g. tobacco cell), plant (e.g. a tobacco plant) that has been altered or changed. The present invention comprises the modification of plants using techniques for genetic modification of plants or non-genetic modification of plants. Such methods are well known in the art and examples of genetic modification techniques include transformation, transgenics, cisgenics, and gene editing methods. Examples of non-genetic modification techniques include fast-neutron mutagenesis, chemical mutagenesis e.g. ethyl methanesulfonate (EMS) mutagenesis and modern population analysis approaches.

[0234] In one embodiment a natural variant which has a modified Nic3 gene (or a modified Nic3 gene in combination with at least one modified Nic1 ERF gene and/or at least one modified Nic2 ERF gene) is selected and that trait or gene is bred into a second plant which has commercially desirable traits.

[0235] In one embodiment the cell or plant (e.g. a tobacco plant) according to the invention may be a transgenic cell plant.

[0236] In another embodiment the cell plant (e.g. a tobacco plant) according to the invention may be a non-transgenic cell or plant.

[0237] Suitably the mutation in the at least one Nic3 gene according to the present invention may not be present in K326.

[0238] Suitably the mutation in the at least one Nic3 gene according to the present invention may not be present in Green Briar.

[0239] Suitably the modulation of the at least one Nic3 gene is not present in Burley 21.

[0240] In some embodiments a modification which modulates the activity or expression of at least one Nic3 gene and thereby modulates alkaloid content is selected from the group consisting of: decreasing, preventing or attenuating transcription, translation or expression of the at least one Nic3 gene (or the combination of at least one Nic3 gene and at least one Nic1 ERF gene and/or at least one Nic2 ERF gene);

[0241] inhibiting synthesis of the polypeptide encoded by at least one Nic3 gene (or the combination of at least one Nic3 gene and at least one Nic1 ERF gene and/or at least one Nic2 ERF gene in combination), or its release from intracellular stores; or

[0242] increasing the rate of degradation of the polypeptide encoded by at least one Nic3 gene (or the combination of at least one Nic3 gene and at least one Nic1 ERF gene and/or at least one Nic2 ERF gene in combination).

[0243] In one embodiment the modification which decreases the activity or expression of at least one Nic3 gene (or one or more modifications which decreases the activity of at least one Nic3 gene and at least one Nic1 ERF gene and/or at least one Nic2 ERF gene in combination) comprises a mutation in one or more genes.

[0244] In one embodiment the mutation deletes the entire one or more Nic3 gene(s). Suitably, a mutation may delete one or more Nic1 ERF genes. Suitably, a mutation may delete one or more Nic2 ERF genes.

[0245] In one embodiment the one or more Nic3 gene(s) may comprise one or more mutations within the gene(s). Suitably the one or more mutations result in reduced or eliminated gene activity in the mutated gene. In one embodiment the one or more mutations results in an inactive gene. In one embodiment the mutation results in an amino acid substitution. In one embodiment the mutation is a nonsense mutation. Suitably, the mutation may inhibit the normal function of the protein encoded by the gene, such as a Nic3 gene, for example inhibiting DNA binding in the case of a transcription factor.

[0246] By way of example, the present method may comprise:
[0247] providing a mutation in a nucleic acid sequence which encodes a protein listed in Table 3, or an amino acid sequence which has at least 70% (preferably at least 80%, preferably at least 90%, preferably at least 96%, preferably at least 98%) sequence identity thereto sequence identity thereto;
[0248] providing a mutation in a promoter of a nucleic acid sequence which encodes a protein comprising the amino acid sequence shown in Table 3, or an amino acid sequence which has at least 70% (preferably at least 80%, preferably at least 90%, preferably at least 96%, preferably at least 98%) sequence identity thereto
[0249] providing a mutation in a nucleic acid sequence of a Nic3 gene listed in Table 3, or a nucleotide sequence which has at least 70% (preferably at least 80%, preferably at least 90%, preferably at least 96%, preferably at least 98%) sequence identity thereto;
[0250] providing a mutation in a promoter of a nucleic acid sequence of a Nic3 gene listed in Table 3 or a nucleotide sequence which has at least 70% (preferably at least 80%, preferably at least 90%, preferably at least 96%, preferably at least 98%) sequence identity thereto;
[0251] providing an antisense RNA, siRNA or miRNA which reduces the level of nucleic acid sequence encoding a Nic3 protein listed in Table 3 or an amino acid sequence which has at least 70% (preferably at least 80%, preferably at least 90%, preferably at least 96%, preferably at least 98%) sequence identity thereto;
[0252] providing an antisense RNA, siRNA or miRNA which reduces the level of a nucleic acid sequence listed in Table 3, or a sequence which has at least 70% (preferably at least 80%, preferably at least 90%, preferably at least 96%, preferably at least 98%) sequence identity thereto. Suitably the protein listed in Table 3 or amino acid sequence shown in Table 3 is selected from SEQ ID Nos. 75, 120, 127 and 129 (or their related sequences as described hereinbefore). Suitably the gene or sequence listed in Table 3 is selected from SEQ ID Nos. 73, 118, 124 and 127 (or their related sequences as described hereinbefore).
[0253] In one embodiment the at least one mutation (or one or more mutation) in the Nic3 locus is in a Nic3 gene selected from SEQ ID No. 73, 118, 124 or 127 or a sequence which has at least 90% identity thereto or a functional variant or functional fragment or orthologue of said gene and said at least one mutation in the Nic3 gene is selected from:
   [0254] i) a mutation in the Nic3 gene SEQ ID No. 73 or a sequence which has at least 90% identity thereto or a functional variant or functional fragment or orthologue of said gene that results in a mutation in amino acid residues 74 to 258 or 483-538 of SEQ ID No. 75 or a sequence which has at least 90% identity thereto, or a functional variant or functional fragment or orthologue of said polypeptide;
   [0255] ii) a mutation in the Nic3 gene SEQ ID No. 118 or a sequence which has at least 90% identity thereto or a functional variant or functional fragment or orthologue of said gene that results in a mutation in amino acid residues 120-584 of SEQ ID No. 120 or a sequence which has at least 90% identity thereto, or a functional variant or functional fragment or orthologue of said polypeptide;
   [0256] iii) a mutation in the Nic3 gene SEQ ID No. 124 or a sequence which has at least 90% identity thereto or a functional variant or functional fragment or orthologue of said gene that results in a mutation in amino acid residues 166-406 or 483-970 of SEQ ID No. 126 or a sequence which has at least 90% identity thereto, or a functional variant or functional fragment or orthologue of said polypeptide; and
   [0257] iv) a mutation in the Nic3 gene SEQ ID No. 127 or a sequence which has at least 90% identity thereto or a functional variant or functional fragment or orthologue of said gene that results in a mutation in amino acid residues 171-406 or 509-967 of SEQ ID No. 129 or a sequence which has at least 90% identity thereto, or a functional variant or functional fragment or orthologue of said polypeptide.

[0258] Amino acid residues 74 to 258 of SEQ ID No. 75 provide the N-terminal MYC domain of the MYC transcription factor. Amino acid residues 483-538 of SEQ ID No. 75 provide a bHLH domain with several DNA-binding sites (which suitably provide sites for mutation), namely at amino acid residues 488, 489, 492, 493, 500, 517 and 518. Amino acid residues 120 to 584 of SEQ ID No. 120 provide an LRR domain. Amino acid residues 166 to 406 of SEQ ID No. 124 provide an NB-ARC domain and amino acid residues 483-970 provide an LRR domain. Amino acid residues 171-406 of SEQ ID No. 129 provide an NB-ARC domain and amino acid residues 509-967 provide an LRR domain. The site of the mutation may also be described by reference to the encoding nucleotide, e.g. amino acid residues 74 to 258 of SEQ ID No. 75 are encoded by nucleotides 631-1185 of SEQ ID No. 73.

[0259] As described above the mutation is made in a specific gene or a related sequence (as defined herein) and provides a mutation in the recited amino acids or in a related sequence (as defined herein). The related sequences correspond to one another. For example, if a mutation is made in a sequence which has 90% sequence identity to SEQ ID No. 75, the resulting mutant is made in the context of that related sequence, i.e. provides a sequence with the same sequence identity before taking into account the one or more mutations that have been introduced. Where a related sequence is mutated a mutation is made in the sequence corresponding to the above recited domains, i.e. taking into account any changes in amino acid number resulting from the generation of a related sequence.

[0260] In one embodiment the mutation may be a deletion. By way of example the domains described above may be deleted in part or in their entirety. In one embodiment the mutation may be an insertion. In one embodiment the mutation may introduce an early stop codon. In one embodiment the target site is unique to the target Nic3 gene and does not exist in other genes.

[0261] In one embodiment the mutants have reduced total alkaloid and/or reduced nicotine levels.

[0262] In one embodiment, the present invention provides one or more mutations in a Nic1 ERF gene encoding a polypeptide comprising (or consisting of) amino acid sequence as shown in Table 1, or a sequence with at least 90%, preferably at least 96%, identity therewith.

[0263] Suitably, the present invention may provide one or more mutations in a Nic1 ERF gene encoding a polypeptide comprising (or consisting of) amino acid sequence SEQ ID No. 8 or a sequence with at least 90%, preferably at least 96%, identity therewith.

[0264] Suitably, the present invention may provide one or more mutations in a Nic1 ERF gene comprising (or consisting of) the nucleotide sequence as set out in: SEQ ID No. 5 or a sequence with at least 90%, preferably at least 96%, identity therewith.

[0265] By way of example, the present method may comprise:
[0266] providing a mutation in a nucleic acid sequence which encodes a protein comprising the amino acid sequence shown SEQ ID No. 8; or SEQ ID No. 4; or SEQ ID No. 12; or SEQ ID No. 16; or SEQ ID No. 20; or SEQ ID No. 24; or SEQ ID No. 28; or SEQ ID No. 32; or SEQ ID No. 36 or an amino acid sequence which has at least 70% (preferably at least 80%, preferably at least 90%, preferably at least 96%, preferably at least 98%) sequence identity thereto;
[0267] providing a mutation in a promoter of a nucleic acid sequence which encodes a protein comprising the amino acid sequence shown as SEQ ID No. 8; or SEQ ID No. 4; or SEQ ID No. 12; or SEQ ID No. 16; or SEQ ID No. 20; or SEQ ID No. 24; or SEQ ID No. 28; or SEQ ID No. 32; or SEQ ID No. 36 or an amino acid sequence which has at least 70% (preferably at least 80%, preferably at least 90%, preferably at least 96%, preferably at least 98%) sequence identity thereto
[0268] providing a mutation in a nucleic acid sequence of an ERF gene which comprises SEQ ID No. 5; or SEQ ID No. 1; or SEQ ID No. 3; or SEQ ID No. 9; or SEQ ID No. 13; or SEQ ID No. 17; or SEQ ID No. 21; or SEQ ID No. 25; or SEQ ID No. 29; or SEQ ID No. 33 or a nucleotide sequence which has at least 70% (preferably at least 80%, preferably at least 90%, preferably at least 96%, preferably at least 98%) sequence identity thereto;
[0269] providing a mutation in a promoter of a nucleic acid sequence of an ERF gene which comprises SEQ ID No. 5; or SEQ ID No. 1; or SEQ ID No. 3; or SEQ ID No. 9; or SEQ ID No. 13; or SEQ ID No. 17; or SEQ ID No. 21; or SEQ ID No. 25; or SEQ ID No. 29; or SEQ ID No. 33 or a nucleotide sequence which has at least 70% (preferably at least 80%, preferably at least 90%, preferably at least 96%, preferably at least 98%) sequence identity thereto;
[0270] providing an antisense RNA, siRNA or miRNA which reduces the level of nucleic acid sequence encoding a protein comprising the amino acid sequence shown as SEQ ID No. 8; or SEQ ID No. 4; or; or SEQ ID No. 12; or SEQ ID No. 16; or SEQ ID No. 20; or SEQ ID No. 24; or SEQ ID No. 28; or SEQ ID No. 32; or SEQ ID No. 36 or an amino acid sequence which has at least 70% (preferably at least 80%, preferably at least 90%, preferably at least 96%, preferably at least 98%) sequence identity thereto;
[0271] providing an antisense RNA, siRNA or miRNA which reduces the level of nucleic acid sequence SEQ ID No. 5; or SEQ ID No. 1; or SEQ ID No. 3, or; or SEQ ID No. 9; or SEQ ID No. 13; or SEQ ID No. 17; or SEQ ID No. 21; or SEQ ID No. 25; or SEQ ID No. 29; or SEQ ID No. 33 or a nucleotide sequence which has at least 70% (preferably at least 80%, preferably at least 90%, preferably at least 96%, preferably at least 98%) sequence identity thereto.

[0272] In one embodiment one or more Nic1 ERF gene(s) and/or one or more Nic2 ERF gene(s) are modulated (e.g. mutated).

[0273] Suitably any one of the Nic3 gene and/or Nic1 ERF gene modifications (e.g. mutations) taught herein may be used in combination with one or more modifications of a Nic2 ERF gene wherein the Nic2 ERF gene encodes a polypeptide which comprises an amino acid sequence as set out in: SEQ ID No. 72; or SEQ ID No. 40; or SEQ ID No. 44; or SEQ ID No. 48; or SEQ ID No. 52; or SEQ ID No. 56; or SEQ ID No. 60; or SEQ ID No. 64; or SEQ ID No. 68; or a functional variant or functional fragment or orthologue thereof; or the Nic2 ERF gene comprises a nucleotide sequence as set out in: SEQ ID No. 69; SEQ ID No. 37; or SEQ ID No. 41; or SEQ ID No. 45; or SEQ ID No. 49; or SEQ ID No. 53; or SEQ ID No. 57; or SEQ ID No. 61; or SEQ ID No. 65; or a functional variant or functional fragment or orthologue thereof.

[0274] By way of example, the present method may comprise:
[0275] providing a mutation in a nucleic acid sequence which encodes a protein comprising the amino acid sequence shown as SEQ ID No. 72; or SEQ ID No. 40; or SEQ ID No. 44; or SEQ ID No. 48; or SEQ ID No. 52; or SEQ ID No. 56; or SEQ ID No. 60; or SEQ ID No. 64; or SEQ ID No. 68; or an amino acid sequence which has at least 70% (preferably at least 80%, preferably at least 90%, preferably at least 96%, preferably at least 98%) sequence identity thereto;
[0276] providing a mutation in a promoter of a nucleic acid sequence which encodes a protein comprising the amino acid sequence shown as SEQ ID No. 72; or SEQ ID No. 40; or SEQ ID No. 44; or SEQ ID No. 48; or SEQ ID No. 52; or SEQ ID No. 56; or SEQ ID No. 60; or SEQ ID No. 64; or SEQ ID No. 68; or an amino acid sequence which has at least 70% (preferably at least 80%, preferably at least 90%, preferably at least 96%, preferably at least 98%) sequence identity thereto;
[0277] providing a mutation in a nucleic acid sequence of an ERF gene which comprises SEQ ID No. 69; or SEQ ID No. 37; or SEQ ID No. 41; or SEQ ID No. 45; or SEQ ID No. 49; or SEQ ID No. 53; or SEQ ID No. 57; or SEQ ID No. 61; or SEQ ID No. 65; or a nucleotide sequence which has at least 70% (preferably at least 80%, preferably at least 90%, preferably at least 96%, preferably at least 98%) sequence identity thereto;
[0278] providing a mutation in a promoter of a nucleic acid sequence of an ERF gene which comprises SEQ ID No. 69; or SEQ ID No. 37; or SEQ ID No. 41; or SEQ ID No. 45; or SEQ ID No. 49; or SEQ ID No. 53; or SEQ ID No. 57; or SEQ ID No. 61; or SEQ ID No. 65; or a nucleotide sequence which has at least 70% (preferably at least 80%, preferably at least 90%, preferably at least 96%, preferably at least 98%) sequence identity thereto;
[0279] providing an antisense RNA, siRNA or miRNA which reduces the level of nucleic acid sequence encoding a protein comprising the amino acid sequence shown as SEQ ID No. 72; or SEQ ID No. 40; or SEQ ID No. 44; or SEQ ID No. 48; or SEQ ID No. 52; or SEQ ID No. 56; or SEQ ID No. 60; or SEQ ID No. 64; or SEQ ID No. 68; or an amino acid sequence which has at least 70% (preferably at least 80%, preferably at least 90%, preferably at least 96%, preferably at least 98%) sequence identity thereto;
[0280] providing an antisense RNA, siRNA or miRNA which reduces the level of nucleic acid sequence SEQ ID No. 69; or SEQ ID No. 37; or SEQ ID No. 41; or SEQ ID No. 45; or SEQ ID No. 49; or SEQ ID No. 53; or SEQ ID No. 57; or SEQ ID No. 61; or SEQ ID No. 65; or a nucleotide sequence which has at least 70% (preferably at least 80%, preferably at least 90%, preferably at least 96%, preferably at least 98%) sequence identity thereto.

[0281] In one embodiment there is used in combination a mutation in at least one Nic1 ERF gene, selected from the group consisting of one or more mutations in a nucleic acid sequence which encodes a protein comprising the amino acid sequence shown as SEQ ID No. 4; or SEQ ID No. 8; or SEQ ID No. 12; or SEQ ID No. 16; or SEQ ID No. 20; or SEQ ID No. 24; or SEQ ID No. 28; or SEQ ID No. 32; or SEQ ID No. 36 or an amino acid sequence which has at least 70% (preferably at least 80%, preferably at least 90%, preferably at least 96%, preferably at least 98%) sequence identity thereto, or one or more mutations in a nucleic acid sequence of an ERF gene which comprises SEQ ID No. 1; or SEQ ID No. 3; or SEQ ID No. 5; or SEQ ID No. 9; or SEQ ID No. 13; or SEQ ID No. 17; or SEQ ID No. 21; or SEQ ID No. 25; or SEQ ID No. 29; or SEQ ID No. 33 or a nucleotide sequence which has at least 70% (preferably at least 80%, preferably at least 90%, preferably at least 96%, preferably at least 98%) sequence identity thereto); and/or a mutation in at least one Nic2 ERF gene, particularly one or mutations in the nucleotide sequence encoding the amino acid sequence SEQ ID No. 40, SEQ ID No. 44, SEQ ID No. 48, SEQ ID No. 52 or SEQ ID No. 56, SEQ ID No. 64, SEQ ID No. 68 or SEQ ID No. 72 or an amino acid sequence which has at least 70% (preferably at least 80%, preferably at least 90%, preferably at least 96%, preferably at least 98%) sequence identity thereto, or one or more mutations in a nucleic acid sequence which comprises SEQ ID No. 37, SEQ ID No. 41, SEQ ID No. 45, SEQ ID No. 49 or SEQ ID No. 53, or SEQ ID No. 57 or SEQ ID No. 61 or SEQ ID No. 65 or SEQ ID No. 69 or a nucleotide sequence which has at least 70% (preferably at least 80%, preferably at least 90%, preferably at least 96%, preferably at least 98%) sequence identity thereto, more particularly, the Nic2 ERF mutation is one or mutations in the nucleotide sequence encoding the amino acid sequence SEQ ID No. 72 or an amino acid sequence which has at least 70% (preferably at least 80%, preferably at least 90%, preferably at least 96%, preferably at least 98%) sequence identity thereto, or in nucleotide sequence SEQ ID No. 69 or a nucleotide sequence which has at least 70% (preferably at least 80%, preferably at least 90%, preferably at least 96%, preferably at least 98%) sequence identity thereto.

[0282] In one embodiment there is used, optionally in combination a mutation in at least one Nic1 ERF gene consisting of one or more mutations in a nucleic acid sequence which encodes a protein comprising the amino acid sequence shown as SEQ ID No. 8; or an amino acid sequence which has at least 70% (preferably at least 80%, preferably at least 90%, preferably at least 96%, preferably at least 98%) sequence identity thereto, or one or more mutations in a nucleic acid sequence of an ERF gene which comprises SEQ ID No. 5; or a nucleotide sequence which has at least 70% (preferably at least 80%, preferably at least 90%, preferably at least 96%, preferably at least 98%) sequence identity thereto); and/or a mutation in at least one Nic2 ERF gene, particularly one or mutations in the nucleotide sequence encoding the amino acid sequence SEQ ID No. 40, SEQ ID No. 44, SEQ ID No. 48, SEQ ID No. 52, SEQ ID No. 56, SEQ ID No. 60, SEQ ID No. 64, SEQ ID No. 68 or SEQ ID No. 72 or an amino acid sequence which has at least 70% (preferably at least 80%, preferably at least 90%, preferably at least 96%, preferably at least 98%) sequence identity thereto, or one or more mutations a nucleotide sequence which comprises SEQ ID No. 37, SEQ ID No. 41, SEQ ID No. 45, SEQ ID No. 49, SEQ ID No. 53, SEQ ID No. 57, SEQ ID No. 61, SEQ ID No. 65 or SEQ ID No. 69 or a nucleotide sequence which has at least 70% (preferably at least 80%, preferably at least 90%, preferably at least 96%, preferably at least 98%) sequence identity thereto.

[0283] In one embodiment there is used optionally in combination a mutation in at least one Nic1 ERF gene consisting of one or more mutations in a nucleic acid sequence which encodes a protein comprising the amino acid sequence shown as SEQ ID No. 8; or an amino acid sequence which has at least 70% (preferably at least 80%, preferably at least 90%, preferably at least 96%, preferably at least 98%) sequence identity thereto, or one or more mutations in a nucleic acid sequence of an ERF gene which comprises SEQ ID No. 5; or a nucleotide sequence which has at least 70% (preferably at least 80%, preferably at least 90%, preferably at least 96%, preferably at least 98%) sequence identity thereto); and/or a mutation in at least one Nic2 ERF gene consisting of one or more mutations in a nucleotide sequence which encodes the amino acid sequence shown as SEQ ID No. 72 or an amino acid sequence which has at least 70% (preferably at least 80%, preferably at least 90%, preferably at least 96%, preferably at least 98%) sequence identity thereto, or one or more mutations in a nucleotide sequence shown as SEQ ID No. 69 or a nucleotide sequence which has at least 70% (preferably at least 80%, preferably at least 90%, preferably at least 96%, preferably at least 98%) sequence identity thereto.

[0284] One or more Nic2 ERF genes may be one, or two, or three, or four, or five, or six, or seven or eight or nine Nic2 ERF genes selected from Table 2.

[0285] In some embodiments a modification which decreases the activity or expression of at least one Nic3 gene (or of at least one Nic3 gene and at least one Nic1 ERF gene and/or at least one Nic2 ERF gene in combination) and thereby decreases alkaloid content is one or more selected from the group consisting of a point mutation, a deletion, an insertion, a duplication, and an inversion in one or more genes. Suitably the modification is introduced by a method selected from random mutagenesis and targeted mutagenesis. Suitably the modification may be introduced by a targeted mutagenesis method selected from meganuclease, zinc finger nuclease, TALEN, gene editing and CRISPR for example.

[0286] As used herein, the term “mutation” encompasses a natural genetic variant or an engineered variant.

[0287] A mutation refers to an inheritable genetic modification introduced to a plant or part thereof or cell, which alters the activity or expression of a product encoded by a gene. These modifications may be in any sequence which controls the activity or expression of a gene, for example in a promoter, 5′ UTR, exon, intron, 3′UTR, or terminator region. In an aspect, a mutation reduces inhibits or eliminates the expression or activity of a gene product. In another aspect a mutation increases, elevates, or augments the activity or expression of a gene product.

[0288] In particular, the term “mutation” refers to a variation in the amino acid sequence compared to the sequences shown in Table 1, Table 2 or Table 3, which reduces the expression or function of the protein.

[0289] In a preferred embodiment, each copy of a nucleic acid sequence shown in Table 1, Table 2 or Table 3 or a sequence which has at least 80% (at least 85%, at least 90%, at least 95%, at least 96%, at least 97%, at least 98%, at least 99%) sequence identity thereto which is present in the plant is mutated as defined herein (e.g. each genomic copy of a gene encoding said protein in a plant is mutated). For example, each copy of the gene in the allotetraploid genome of N. tabacum may be mutated.

[0290] In a preferred embodiment the plant or plant cell according to the present invention is homozygous for the mutation.

[0291] In one embodiment preferably the plant or plant cell according to the present invention expresses only the mutated nucleic acid. In other words, in some embodiments no endogenous (or endogenous and functional) protein is present in the plants according to the present invention. In other words if any endogenous protein is present it is preferably in an inactive and/or truncated form.

[0292] The mutation may interrupt the nucleic acid sequence which encodes a protein as detailed herein. The interruption may cause the nucleic acid sequence to not be transcribed and/or translated.

[0293] The nucleic acid sequence may be interrupted, for example, by deleting or otherwise modifying the ATG start codon of the nucleic acid sequence such that translation of the protein is reduced or prevented.

[0294] The nucleic acid sequence may comprise one or more nucleotide change(s) that reduce or prevent expression of the protein or affect protein trafficking. For example, expression of the protein may be reduced or prevented by introduction of one or more pre-mature stop codons, a frame shift, a splice mutant or a non-tolerated amino acid substitution in the open reading frame. A premature stop codon refers to a mutation which introduces a stop codon into the open reading frame and prevents translation of the entire amino acid sequence. The premature stop codon may be a TAG (“amber”), TAA (“ochre”), or TGA (“opal” or “umber”) codon.

[0295] Suitably, the premature stop codon may be introduced to Nitab4.5_0003090 g0030.1 (ERF199); as shown in any of SEQ ID No. 5-7.

[0296] Suitably, the premature stop codon in Nitab4.5_0003090 g0030.1 (ERF199); as shown in any of SEQ ID No. 5-7 may be a TGA (“opal” or “umber”) premature stop codon.

[0297] A frame-shift mutation (also called a framing error or a reading frame shift) is a mutation caused by indels (insertions or deletions) of a number of nucleotides in a nucleic acid sequence that is not divisible by three. Due to the triplet nature of gene expression by codons, the insertion or deletion can change the reading frame, resulting in a completely different translation from the original. A frameshift mutation will often cause the reading of the codons after the mutation to code for different amino acids. The frameshift mutation will commonly result in the introduction of a premature stop codon.

[0298] A splice mutant inserts, deletes or changes a number of nucleotides in the specific site at which splicing takes place during the processing of precursor messenger RNA into mature messenger RNA. The deletion of the splicing site results in one or more introns remaining in mature mRNA and may lead to the production of abnormal proteins.

[0299] A non-tolerated amino acid substitution refers to a mutation which causes a non-synonymous amino acid substitution in the protein which results in reduced or ablated function of the protein.

[0300] Any method known in the art for providing a mutation in a nucleic acid sequence may be used in the present method. For example, homologous recombination may be used, in which a vector is created in which the relevant nucleic acid sequence(s) are mutated and used to transform plants or plant cells. Recombinant plants or plant cells expressing the mutated sequence may then be selected.

[0301] The nucleic acid sequence may be wholly or partially deleted. The deletion may be continuous, or may comprise a plurality of sections of sequence. The deletion preferably removes a sufficient amount of nucleotide sequence such that the nucleic acid sequence no longer encodes a functional protein. The deletion may, for example, remove at least 50, 60, 70, 80 or 90% of the coding portion of the nucleic acid sequence.

[0302] The deletion may be total, in which case 100% of the coding portion of the nucleic acid sequence is absent, when compared to the corresponding genome a comparable unmodified plant.

[0303] Methods for deletion of nucleic acid sequences in plants are known in the art. For example, homologous recombination may be used, in which a vector is created in which the relevant nucleic acid sequence(s) are missing and used to transform plants or plant cells. Recombinant plants or plant cells expressing the new portion of sequence may then be selected.

[0304] Plant cells transformed with a vector as described above may be grown and maintained in accordance with well-known tissue culturing methods such as by culturing the cells in a suitable culture medium supplied with the necessary growth factors such as amino acids, plant hormones, vitamins, etc.

[0305] Modification of the nucleic acid sequence may be performed using targeted mutagenesis methods (also referred to as targeted nucleotide exchange (TNE) or oligo-directed mutagenesis (ODM)). Targeted mutagenesis methods include, without limitation, those employing zinc finger nucleases, TALENs (see WO2011/072246 and WO2010/079430), Cas9-like, Cas9/crRNA/tracrRNA or Cas9/gRNA CRISPR systems (see WO 2014/071006 and WO2014/093622), meganucleases (see WO2007/047859 and WO2009/059195), or targeted mutagenesis methods employing mutagenic oligonucleotides, possibly containing chemically modified nucleotides for enhancing mutagenesis with sequence complementarity to the gene, into plant protoplasts (e.g., KeyBase® or TALENs).

[0306] Alternatively, mutagenesis systems such as TILLING (Targeting Induced Local Lesions IN Genomics; McCallum et al., 2000, Nat Biotech 18:455, and McCallum et al. 2000, Plant Physiol. 123, 439-442, both incorporated herein by reference) may be used to generate plant lines which comprise a gene encoding a protein having a mutation. TILLING uses traditional chemical mutagenesis (e.g. ethyl methanesulfonate (EMS) mutagenesis) followed by high-throughput screening for mutations. Thus, plants, seeds and tissues comprising a gene having the desired mutation may be obtained.

[0307] The method may comprise the steps of mutagenizing plant seeds (e.g. EMS mutagenesis), pooling of plant individuals or DNA, PCR amplification of a region of interest, heteroduplex formation and high-throughput detection, identification of the mutant plant, sequencing of the mutant PCR product. It is understood that other mutagenesis and selection methods may equally be used to generate such modified plants. Seeds may, for example, be radiated or chemically treated and the plants may be screened for a modified phenotype.

[0308] Modified plants may be distinguished from non-modified plants, i.e., wild type plants, by molecular methods, such as the mutation(s) present in the DNA, and by the modified phenotypic characteristics. The modified plants may be homozygous or heterozygous for the mutation.

[0309] Suitably the method may comprise transforming a cell of a plant (e.g. a tobacco plant) with a genetic construct which is capable of inhibiting the activity or expression of at least one Nic3 gene (or a construct which is capable of inhibiting the activity or expression of at least one Nic1 ERF gene and/or at least one Nic2 ERF gene, in combination with at least one Nic3 gene).

[0310] In some embodiments a modification which increases the activity or expression of at least one Nic3 gene (or of at least one Nic3 gene and at least one Nic1 ERF gene and/or at least one Nic2 ERF gene in combination) and thereby increases alkaloid content is selected from the group consisting of:

[0311] increasing, promoting or augmenting transcription, translation or expression of the at least one Nic3 gene (or the at least one Nic3 gene and the at least one Nic1 ERF gene and/or the at least one Nic2 ERF gene in combination);

[0312] increasing synthesis of the polypeptide encoded by at least one Nic3 gene (or of the at least one Nic3 gene and the at least one Nic1 ERF gene and/or the at least one Nic2 ERF gene in combination), or its release from intracellular stores; or

[0313] decreasing the rate of degradation of the polypeptide encoded by at least one Nic3 gene (or of the at least one Nic3 gene and the at least one Nic1 ERF gene and/or the at least one Nic2 ERF gene in combination).

[0314] Suitably the method may comprise transforming a cell of a plant (e.g. a tobacco plant) with a genetic construct which encodes at least one exogenous Nic3 gene (or which encodes at least one Nic3 gene and at least one Nic1 ERF gene and/or at least one Nic2 ERF gene in combination), or which comprises a nucleotide sequence which encodes a protein which is capable of promoting or augmenting at least one endogenous Nic3 gene (or at least one endogenous Nic3 gene and at least one endogenous Nic1 ERF gene and/or at least one endogenous Nic2 ERF gene in combination). It will be appreciated that each of these options would result in an increased activity and expression of the polypeptide encoded by the at least one Nic3 gene (or of the at least one Nic3 gene and at least one Nic1 ERF gene and/or at least one Nic2 ERF gene in combination). The method may comprise regenerating the plant from the transformed cell.

[0315] Thus, there is provided use of genetic construct which is capable of increasing the activity and/or expression of a polypeptide encoded by at least one Nic3 (or at least one Nic3 gene and at least one Nic1 ERF gene and/or at least one Nic2 ERF gene in combination), for increasing the alkaloid content in a plant transformed with the construct.

[0316] The genetic construct may encode a polypeptide comprising the amino acid sequence as set out in: Table 1, Table 2 and/or Table 3, or a functional variant or functional fragment or orthologue thereof.

[0317] In some embodiments a method or use according to the present invention comprises increasing the alkaloid content of a plant (e.g. a tobacco plant) or cell by increasing the activity or expression of a Nic3 gene, or the activity or expression of a Nic3 gene and a Nic1 ERF gene and/or a Nic2 ERF gene.

[0318] The term “inhibiting” (e.g. inhibiting the activity or expression of a Nic3 gene) as used herein means that the activity or expression of the gene (e.g. Nic3 gene) is lower or decreased compared with the gene activity or expression of the gene in a comparable product or the amount or activity of a protein produced by the gene is lower.

[0319] In one embodiment the term “inhibiting” (e.g. inhibiting the activity or expression of a Nic3 gene) as used herein means that the activity or expression of the Nic3 gene is lower compared with the gene activity or expression of the gene in a comparable product.

[0320] The activity of specific Nic3 gene, Nic1 ERF gene or Nic2 ERF gene can be measured by measuring transcription of the gene. Methods for measuring transcription are well known in the art and include, amongst others, northern blot, RNA-Seq, in situ hybridization, DNA microarrays and RT-PCR. Alternatively, the activity of a gene may be measured indirectly by measuring the level of the gene product for example the protein encoded by said gene.

[0321] In some embodiments the activity or expression of a Nic3 gene, Nic1 ERF gene or Nic2 ERF gene may be modulated i.e. increased or decreased by at least about 10% 20% 30%, or 40%, suitably at least about 50%, 60%, 70%, more suitably at least about 80%, 90%, 95% or 100% when compared to the activity or expression of said gene in a plant (e.g. a tobacco plant) which has not been modified in accordance with the present invention.

[0322] Suitably, the expression or function of the Nic3 gene, Nic1 ERF gene or Nic2 ERF gene may be reduced, partly inactivated, inhibited, eliminated, knocked out or lost such that the protein expression or function of said gene is not detectable.

[0323] In one aspect, the at least one Nic3 gene, Nic1 ERF gene or Nic2 ERF gene is knocked out. In other words, the gene has been rendered completely inoperative.

[0324] In a preferred embodiment the Nic3 gene may have substantially no activity or expression, which means that the plant may comprise less than about 1% (suitably less than about 0.1%) activity or expression, preferably when compared to a plant which has not been modified to inhibit the activity or expression of a Nic3 gene.

[0325] In a preferred embodiment the Nic1 ERF gene may have substantially no activity or expression, which means that the plant may comprise less than about 1% (suitably less than about 0.1%) activity or expression, preferably when compared to a plant which has not been modified to inhibit the activity or expression of a Nic1 ERF gene.

[0326] In a preferred embodiment the Nic2 ERF gene may have substantially no activity or expression, which means that the plant may comprise less than about 1% (suitably less than about 0.1%) activity or expression, preferably when compared to a plant which has not been modified to inhibit the activity or expression of a Nic2 ERF gene.

[0327] An “ERF gene” as used herein refers to a transcription factor gene which belongs to the ethylene response factor (ERF) subfamily.

[0328] A “Nic1 ERF gene” as used herein refers to an ERF gene which the present inventors have identified in WO2018/237107 as mapping to the Nic1 region. Nic1 ERF genes as used herein are listed in Table 1 along with their corresponding nucleotide, cDNA, cds and amino acid sequence identifiers.

[0329] Suitably the at least one Nic1 ERF gene for use in the present invention is any one of those listed in Table 1.

[0330] The genomic sequences of each of the Nic1 ERFs and the Nic2 ERFs listed in the tables above are identical to their corresponding coding sequences with the exception of the Nic1 ERF ERF17L3. The genomic sequence of ERF17L3 (SEQ ID No. 1) is not identical to the coding sequence of ERF17L3 (SEQ ID No. 3).

[0331] A “Nic2 ERF gene” as used herein refers to an ERF gene which t maps to the Nic2 region. Nic2 ERF genes as used herein are listed in Table 2 below along with their corresponding nucleotide, cDNA, cds and amino acid sequence identifiers.

[0332] Suitably the Nic2 ERF gene for use in the present invention is any one of those listed in Table 2. In one embodiment the at least one Nic3 gene referred to herein may be encoded by a polynucleotide sequence shown in Table 3.

[0333] Suitably, the at least one Nic3 gene referred to herein may be encoded by a polynucleotide sequence comprising:
[0334] i) a polynucleotide sequence shown herein as SEQ ID No. 73, SEQ ID No. 76, SEQ ID No. 79, SEQ ID No. 82, SEQ ID No. 85, SEQ ID No. 88, SEQ ID No. 91, SEQ ID No. 94, SEQ ID No. 97, SEQ ID No. 100, SEQ ID No. 103, SEQ ID No. 106, SEQ ID No. 109, SEQ ID No. 112, SEQ ID No. 115, SEQ ID No. 118, SEQ ID No. 121, SEQ ID No. 124, SEQ ID No. 127, SEQ ID No. 130, SEQ ID No. 133, SEQ ID No. 136, SEQ ID No. 139, SEQ ID No. 142, SEQ ID No. 145, SEQ ID No. 148 or SEQ ID No. 151 (suitably SEQ ID No. 73, 118, 124 or 127); or a sequence which has at least 80% identity thereto; or
[0335] ii) a functional fragment of the polynucleotide sequence shown in i) which functional fragment encodes a Nic3 gene, or
[0336] iii) a polynucleotide which encodes a polypeptide comprising the amino acid sequence shown herein as SEQ ID No. 75, SEQ ID No. 78, SEQ ID No. 81, SEQ ID No. 84, SEQ ID No. 87, SEQ ID No. 90, SEQ ID No. 93, SEQ ID No. 96, SEQ ID No. 99, SEQ ID No. 102, SEQ ID No. 105, SEQ ID No. 108, SEQ ID No. 111, SEQ ID No. 114, SEQ ID No. 117, SEQ ID No. 120, SEQ ID No. 123, SEQ ID No. 126, SEQ ID No. 129, SEQ ID No. 132, SEQ ID No. 135, SEQ ID No. 138, SEQ ID No. 141, SEQ ID No. 144, SEQ ID No. 147, SEQ ID No. 150 or SEQ ID No. 153, suitably SEQ No. 75, 120, 126 or 129), or
[0337] iv) a polynucleotide sequence which can hybridize to the polynucleotide taught in i), ii) or iii) above under high stringency conditions, or
[0338] v) a polynucleotide sequence which has at least 80% (preferably 85%, preferably 90%, preferably 95%, more preferably 96%, more preferably 97%, more preferably 98%) identity with the polynucleotide shown in i), ii) or iii) above, or
[0339] vi) a polynucleotide sequence which differs from polynucleotide shown in i), ii) or iii) due to degeneracy of the genetic code.

[0340] In one embodiment the at least one Nic1 ERF gene referred to herein may be encoded by a polynucleotide sequence comprising:
[0341] i) a polynucleotide sequence shown herein as SEQ ID No. 1, SEQ ID No. 3; SEQ ID No. 5, SEQ ID No. 9, SEQ ID No. 13, SEQ ID No. 17, SEQ ID No. 21, SEQ ID No. 25, SEQ ID No. 29 or SEQ ID No. 33; or
[0342] ii) a functional fragment of the polynucleotide sequence shown in i) which functional fragment encodes a Nic1 ERF synthesis gene, or
[0343] iii) a polynucleotide which encodes a polypeptide comprising the amino acid sequence shown herein as SEQ ID No. 4, SEQ ID No. 8, SEQ ID No. 12, SEQ ID No. 16, SEQ ID No. 20, SEQ ID No. 24, SEQ ID No. 28, SEQ ID No. 32 or SEQ ID No. 36, or
[0344] iv) a polynucleotide sequence which can hybridize to the polynucleotide taught in i), ii) or iii) above under high stringency conditions, or
[0345] v) a polynucleotide sequence which has at least 70% (preferably 80%, preferably 85%, preferably 90%, preferably 95%, more preferably 96%, more preferably 97%, more preferably 98%) identity with the polynucleotide shown in i), ii) or iii) above, or
[0346] vi) a polynucleotide sequence which differs from polynucleotide shown in i), ii) or iii) due to degeneracy of the genetic code.

[0347] In one embodiment the at least one Nic2 ERF gene referred to herein may be encoded by a polynucleotide sequence comprising:
[0348] i) a polynucleotide sequence shown herein as SEQ ID No. 37, SEQ ID No. 41, SEQ ID No. 45, SEQ ID No. 49, SEQ ID No. 53, SEQ ID No. 57, SEQ ID No. 61, SEQ ID No. 65 or SEQ ID No. 69; or
[0349] ii) a functional fragment of the polynucleotide sequence shown in i) which functional fragment encodes a Nic1 ERF gene, or
[0350] iii) a polynucleotide which encodes a polypeptide comprising the amino acid sequence shown herein as SEQ ID No. 40, SEQ ID No. 44, SEQ ID No. 48, SEQ ID No. 52, SEQ ID No. 56, SEQ ID No. 60, SEQ ID No. 64, SEQ ID No. 68 or SEQ ID No. 72, or iv) a polynucleotide sequence which can hybridize to the polynucleotide taught in i), ii) or iii) above under high stringency conditions, or
[0351] v) a polynucleotide sequence which has at least 70% (preferably 80%, preferably 85%, preferably 90%, preferably 95%, more preferably 96%, more preferably 97%, more preferably 98%) identity with the polynucleotide shown in i), ii) or iii) above, or
[0352] vi) a polynucleotide sequence which differs from polynucleotide shown in i), ii) or iii) due to degeneracy of the genetic code.

[0353] In one embodiment the at least one Nic3 gene for use in accordance with the present invention may be endogenous to the plant (e.g. a tobacco plant).

[0354] In one embodiment the at least one Nic1 ERF gene for use in accordance with the present invention may be endogenous to the plant (e.g. a tobacco plant).

[0355] In one embodiment the at least one Nic2 ERF gene for use in accordance with the present invention may be endogenous to the plant (e.g. a tobacco plant).

[0356] Reference herein to an “endogenous” gene not only refers to the gene in question as found in a plant in its natural form (i.e., without there being any human intervention), but also refers to that same gene (or a substantially homologous nucleic acid/gene) in an isolated form subsequently (re)introduced into a plant (a transgene) or a plant cell. For example, a transgenic plant containing such a transgene may encounter a substantial reduction of the transgene expression and/or substantial reduction of expression of the endogenous gene. The isolated gene may be isolated from an organism or may be manmade, for example by chemical synthesis.

[0357] In another embodiment the at least one Nic3 gene for use in accordance with the present invention may be exogenous to the plant (e.g. a tobacco plant).

[0358] In another embodiment the at least one Nic1 ERF gene for use in accordance with the present invention may be exogenous to the plant (e.g. a tobacco plant).

[0359] In another embodiment the at least one Nic2 ERF gene for use in accordance with the present invention may be exogenous to the plant (e.g. a tobacco plant).

[0360] The term “exogenous gene” can mean the gene that is transformed into the unmodified plant is from an external source, i.e. from a different species to the one being transformed. The exogenous gene may comprise a nucleic acid sequence substantially the same or different to an endogenous gene in the unmodified plant. The exogenous gene may be derived from a genomic or cDNA sequence corresponding to the gene from any species. The exogenous gene may form a chimeric gene. The exogenous gene may encode a polypeptide comprising the amino acid sequence as set out in Table 1, or a functional variant or fragment or orthologue thereof. The exogenous gene may comprise the nucleotide sequence as set out in Table 2, or a functional variant or fragment or orthologue thereof. The exogenous gene may comprise the nucleotide sequence as set out in Table 3, or a functional variant or fragment or orthologue thereof.

[0361] The present invention also provides the use of a Nic3 gene for modulating the alkaloid content of a plant.

[0362] In one embodiment the invention further provides the use of a Nic3 gene, and optionally a Nic1 ERF and/or a Nic2 ERF for modulating the alkaloid content of a plant.

[0363] Methods for decreasing expression of genes or gene products are well documented in the art. Any method described herein for modulating activity or expression of a Nic3 gene may be used to modify the activity or expression of a Nic3 gene, and optionally a Nic1 ERF gene and/or a Nic2 ERF gene.

[0364] In one embodiment the activity or expression of a Nic3 gene or the activity or expression of a Nic3 gene, and optionally a Nic1 ERF gene and/or a Nic2 ERF gene may be inhibited by any method known in the art.

[0365] Methods for inhibiting the activity or expression of a Nic3 gene or the activity or expression of a Nic3 gene and a Nic1 ERF gene and/or a Nic2 ERF gene may include gene editing, targeted mutagenesis, RNA interference, antisense or sense co-suppression (see Wang and Wagner 2003, Planta Volume 216, Issue 4, pp 686-691, which is incorporated herein by reference). In one embodiment the inhibition of activity or expression of a gene may be achieved by the use of gene editing. Gene editing may be carried out using any method known in the art. A few non-limiting examples are presented herein.

[0366] In one embodiment the inhibition of activity or expression of a Nic3 gene or the activity or expression of a Nic3 gene and a Nic1 ERF gene and/or a Nic2 ERF gene may be achieved using gene editing methods including CRISPR, including use of the CRISPR/Cas9 system.

[0367] CRISPR/Cas9 genomic editing tools are available commercially such as “Guide-it” from Clontech (Avenue du President Kennedy 78100 Saint-Germain-en-Laye, France).

[0368] Suitably, to generate a gene editing vector pRGEB-M24, the rice snoRNA U3 promoter in the vector pRGEB31 may be substituted with the M24 promoter amplified from pSiM24 (Sahoo et al., 2014 incorporated herein by reference) through infusion cloning assisted with HindIII and BsaI as described in WO2018/237107 which is incorporate herein by reference. For example, one pair of oligos can be designed to specifically target each of the candidate genes.

[0369] The oligo pairs are first annealed to produce a double-stranded fragment with 4-nt 5′ overhangs at both ends, and then ligated into the BsaI digested pRGEB-M24 vector.

[0370] Another method of gene editing includes the use of TALEN (transcription activator-like effector nuclease) technology with kits available commercially (e.g. from Addgene, 1Kendall Sq. Ste. B7102, Cambridge, Mass. 02139, USA). In one embodiment the inhibition of activity or expression of the at least one Nic3 gene or the activity or expression of at least one Nic3 gene and at least one Nic1 ERF gene and/or at least one Nic2 ERF gene may be achieved using TALEN.

[0371] In another embodiment the method may comprise the use of Zinc Finger Nucleases such as the CompoZr® Zinc Finger Nuclease Technology available from Sigma-Aldrich. Another embodiment may comprise the use of meganucleases (or a further method) described in Silva et al. Curr Gene Ther. February 2011; 11(1): 11-27 (the teaching of which is incorporated herein by reference). In one embodiment the method for inhibiting the activity or expression of a Nic3 gene or a Nic3 gene and a Nic1 ERF gene and/or a Nic2 ERF gene may be targeted mutagenesis. Any method of targeted mutagenesis may be used. In one embodiment the method may be oligonucleotide-directed mutagenesis (ODM) such as KeyBase® available from Keygene (Agro Business Park 90, 6708 P W Wageningen, The Netherlands). In another embodiment, inhibition of the activity or expression of a Nic3 gene or the activity or expression of a Nic3 gene and a Nic1 ERF gene and/or a Nic2 ERF gene may be achieved by use of a construct or vector (e.g. a plasmid).

[0372] Genetic constructs of the invention may be in the form of an expression cassette, which may be suitable for inhibition of the activity or expression of a Nic3 gene or the activity or expression of a Nic3 gene and a Nic1 ERF gene and/or a Nic2 ERF gene in a host cell or for increasing the activity or expression of a Nic3 gene or the activity or expression of a Nic3 gene and a Nic1 ERF gene and/or a Nic2 ERF gene in a host cell. The genetic construct may be introduced into a host cell without it being incorporated in a vector. For instance, genetic construct, which may be a nucleic acid molecule, may be incorporated within a liposome or a virus particle. Alternatively, a purified nucleic acid molecule (e.g. histone-free DNA or naked DNA) may be inserted directly into a host cell by suitable means, e.g. direct endocytotic uptake. The genetic construct may be introduced directly into cells of a host subject (e.g. a plant) by transfection, infection, microinjection, cell fusion, protoplast fusion or ballistic bombardment. Alternatively, genetic constructs of the invention may be introduced directly into a host cell using a particle gun.

[0373] Alternatively, the genetic construct may comprise or be harboured within a recombinant vector, for expression in a suitable host cell. The recombinant vector may be a plasmid, cosmid or phage.

[0374] Such recombinant vectors are highly useful for transforming host cells with the genetic construct of the invention, and for replicating the expression cassette therein. The skilled technician will appreciate that genetic constructs of the invention may be combined with many types of backbone vector for expression purposes. The backbone vector may be a binary vector, for example one which can replicate in both E. coli and Agrobacterium tumefaciens. For example, a suitable vector may be a pBIN plasmid, such as pBIN19 (Bevan M., 1984, Nucleic Acids Research 12:8711-21). Recombinant vectors may include a variety of other functional elements in addition to the sequence which inhibits the activity or expression of the at least one Nic3 gene, or the activity or expression of at least one Nic3 gene and at least one Nic1 ERF gene and/or at least one Nic2 ERF gene. For example, the vector may comprise a promoter. In addition, the recombinant vector may be designed such that it autonomously replicates in the cytosol of the host cell. In this case, elements which induce or regulate DNA replication may be required in the recombinant vector.

[0375] Alternatively, the recombinant vector may be designed such that it integrates into the genome of a host cell. In this case, DNA sequences which favor targeted integration (e.g. by homologous recombination) are envisaged.

[0376] The recombinant vector may also comprise DNA coding for a gene that may be used as a selectable marker in the cloning process, i.e. to enable selection of cells that have been transfected or transformed, and to enable the selection of cells harbouring vectors incorporating heterologous DNA. The vector may also comprise DNA involved with regulating expression of the coding sequence, or for targeting the expressed polypeptide to a certain part of the host cell, e.g. to trichomes or glandular trichomes. Hence, the vector may comprise at least one additional element selected from a group consisting of: a selectable marker gene (e.g. an antibiotic resistance gene); a polypeptide termination signal; and a protein targeting sequence (e.g. a transit peptide).

[0377] In one embodiment, the method or use may comprise inhibiting the activity or expression of a Nic3 gene or the activity or expression of a Nic3 gene and a Nic1 ERF gene and/or a Nic2 ERF gene using an interfering oligonucleotide. In one embodiment the oligonucleotide is RNA based.

[0378] In one embodiment the oligonucleotide is RNA interference (RNAi), e.g. dsRNAi. In one embodiment the method may comprise transforming a cell of a plant (e.g. a tobacco plant) with an RNAi molecule, e.g. dsRNAi, which inhibits the activity or expression of a Nic3 gene, or the activity or expression of a Nic3 gene and a Nic1 ERF gene and/or a Nic2 ERF gene. Suitably the RNAi molecule may be provided from a vector which may be introduced into a cell of the plant, e.g. virus-included gene silencing may be used which carries a fragment of a relevant gene (for example a fragment which is from 100 to 300 nucleotides in length) and produces dsRNA to trigger RNA-mediated gene silencing.

[0379] In one embodiment the activity or expression of at least one Nic3 gene, Nic1 ERF gene, and/or Nic2 ERF gene is decreased by at least 30%, 35%, 40%, 45%, 50%, 55%, 60%, 65%, 70%, 75%, 80%, 85%, 90%, 95% or more, or by 100% compared to the activity or expression of the polypeptide in a comparable plant or part thereof or cell.

[0380] In one embodiment the activity or expression of the at least one Nic3 gene, the at least one Nic1 ERF gene and the at least one Nic2 ERF gene is decreased by at least 30%, 35%, 40%, 45%, 50%, 55%, 60%, 65%, 70%, 75%, 80%, 85%, 90%, 95% or more, or by 100% compared to the activity or expression of the polypeptide in the wild-type plant or a comparable plant, or part thereof or cell.

[0381] The activity or expression of the at least one Nic3 gene or the activity or expression of at least one Nic3 gene and at least one Nic1 ERF gene and/or at least one Nic2 ERF gene may be inhibited by any method known in the art. In any of the preceding embodiments the activity or expression of the at least one Nic3 gene or the activity or expression of at least one Nic3 gene and at least one Nic1 ERF gene and/or at least one Nic2 ERF gene may be inhibited by any method including gene editing methods including CRISPR, including use of the CRISPR-Cas9 system, RNA interference (RNAi), antisense or sense co-suppression, gene editing or targeted mutagenesis. In any of the preceding embodiments the activity or expression of at least one Nic3 gene or the activity or expression of at least one Nic3 gene and at least one Nic1 ERF gene and/or at least one Nic2 ERF gene may be inhibited using an RNAi method for example using miRNA, siRNA, dsRNA or shRNA.

[0382] In one embodiment the construct which modulates Nic3 gene activity or expression or the activity or expression of at least one Nic3 gene and at least one Nic1 ERF gene and/or at least one Nic2 ERF gene may be comprised in a vector. Suitably the vector may be a plasmid.

[0383] In one embodiment, the vector for use in the present invention is the Agrobacterium-based plasmid.

[0384] Accordingly in one embodiment plants (e.g. a tobacco plants) and plant propagation materials (e.g. a tobacco plant propagation materials), leaves (e.g. tobacco leaves), cut harvested leaves, processed leaves (e.g. processed tobacco leaves) or cut and processed leaves (e.g. cut and processed tobacco leaves) are provided wherein expression of a Nic3 gene or the activity or expression of a Nic3 gene and a Nic1 ERF gene and/or a Nic2 ERF gene is modulated.

[0385] In another embodiment the cell (e.g. tobacco cell), plant (e.g. a tobacco plant) or part thereof, and/or plant propagation material may comprise a construct which modulates the activity or expression of a Nic3 gene or the activity or expression of a Nic3 gene and a Nic1 ERF gene and/or a Nic2 ERF gene. In one embodiment the construct decreases the activity or expression of a Nic3 gene or the activity or expression of a Nic3 gene and a Nic1 ERF gene and/or a Nic2 ERF gene. In another embodiment the construct increases the activity or expression of a Nic3 gene or the activity or expression of a Nic3 gene and a Nic1 ERF gene and/or a Nic2 ERF gene.

[0386] In a further embodiment the cell (e.g. tobacco cell), plant (e.g. a tobacco plant) or part thereof and/or plant propagation material according to the invention may comprise:
[0387] i) a polynucleotide sequence shown in Table 3; or
[0388] ii) a functional fragment of the polynucleotide sequence shown in i) which functional fragment encodes a Nic3 gene, or
[0389] iii) a polynucleotide which encodes a polypeptide comprising the amino acid sequence shown in Table 3, or
[0390] iv) a polynucleotide sequence which can hybridize to the polynucleotide taught in i), ii) or iii) above under high stringency conditions, or
[0391] v) a polynucleotide sequence which has at least 80% (preferably 85%, preferably 90%, preferably 95%, more preferably 96%, more preferably 97%, more preferably 98%) identity with the polynucleotide shown in i), ii) or iii) above, or
[0392] vi) a polynucleotide sequence which differs from polynucleotide shown in i), ii) or iii) due to degeneracy of the genetic code. Suitably the Table 3 sequences are as described hereinbefore.

[0393] In a further embodiment the cell (e.g. tobacco cell), plant (e.g. a tobacco plant) or part thereof and/or plant propagation material according to the invention may comprise:
[0394] i) a polynucleotide sequence selected from Table 3, a polynucleotide sequence selected from Table 1, and a polynucleotide sequence selected from Table 2; or
[0395] ii) a functional fragment of the polynucleotide sequence shown in i) which functional fragment encodes a Nic3 gene, Nic1 ERF gene or Nic2 ERF gene; or
[0396] iii) a polynucleotide which encodes a polypeptide comprising the amino acid sequence shown in Table 3, Table 1 and Table 2; or
[0397] iv) a polynucleotide sequence which can hybridize to the polynucleotide taught in i), ii) or iii) above under high stringency conditions; or
[0398] v) a polynucleotide sequence which has at least 80% (preferably 85%, preferably 90%, preferably 95%, more preferably 96%, more preferably 97%, more preferably 98%) identity with the polynucleotide shown in i), ii) or iii) above; or
[0399] vi) a polynucleotide sequence which differs from polynucleotide shown in i), ii) or iii) due to degeneracy of the genetic code. Suitably the Table 1, 2 or 3 sequences are as described hereinbefore.

[0400] In one embodiment the cell (e.g. tobacco cell) is grown in a cell culture.

[0401] In one embodiment, at least one Nic3 gene (or at least one Nic3 gene and at least one Nic1 ERF gene and/or at least one Nic2 ERF gene) is used to modulate alkaloid content (e.g. nicotine content) in a cell or cell culture (e.g. a tobacco cell culture).

[0402] In an advantageous embodiment, inhibition of the activity or expression of at least one Nic3 gene or the activity or expression of at least one Nic3 gene and at least one Nic1 ERF gene and/or at least one Nic2 ERF gene may result in a decrease in alkaloid content. Suitably inhibition of the activity or expression of at least one Nic3 gene or the activity or expression of at least one Nic3 gene and at least one Nic1 ERF gene and/or at least one Nic2 ERF gene may result in a decrease in nicotine content.

[0403] In another embodiment increasing the activity or expression of a Nic3 gene (or the activity or expression of a Nic3 gene and a Nic1 ERF gene and/or a Nic2 ERF gene) may result in a decrease in alkaloid content. Suitably increasing the activity or expression of a Nic3 ERF or the activity or expression of a Nic3 gene and a Nic1 ERF gene and/or a Nic2 ERF gene may result in a decrease in nicotine content.

[0404] In one embodiment the plant or part thereof is a tobacco plant. In one embodiment the tobacco plant or part thereof according to the present invention is a Burley or Flue-cured plant modified in Burley or Flue-cured plant modified in accordance with the present invention. In one embodiment the tobacco plant (e.g. modified tobacco plant) according to the present invention is an Oriental or Turkish tobacco plant.

[0405] In one embodiment the tobacco plant or part thereof is cured. In one embodiment the tobacco plant or part thereof is cured e.g. air-cured, flue-cured, fire-cured or sun-cured. In a further aspect, the tobacco plant or part thereof is flue-cured. In a further aspect, the tobacco plant or part thereof is air-cured.

[0406] Flue-curing is well-known in the art and refers to the process of curing tobacco with flues which are fed by fire boxes or gas fueled systems. This process heat-cures the tobacco without exposing it to smoke, slowly raising the temperature over the course of the curing. This method produces tobacco that is high in sugar and has medium to high levels of nicotine. The Smith Tobacco Barn is an example of a traditional, flue-cured tobacco barn.

[0407] Air-cured tobaccos include Burley, Maryland, and dark tobaccos. The common factor is that curing is primarily without artificial sources of heat and humidity. Burley tobaccos are light to dark brown in colour, high in oil, and low in sugar. Burley tobaccos are air-cured in barns. Major Burley growing countries are Argentina, Brazil, Italy, Malawi, and the U.S. Burley tobacco plants include, for example, Clay 402, Clay 403, Clay 502, Ky 14, Ky 907, Ky 910, Ky 8959, NC 2, NC 3, NC 4, NC 5, NC 2000, TN 86, TN 90, TN 97, R 610, R 630, R711, R 712, NCBH 129, Bu 21xKy 10, HBO4P, Ky 14xL 8, Kt 200, Newton 98, Pedigo 561, Pf561 and Va 509.

[0408] Maryland tobaccos have good burning properties, low nicotine and a neutral aroma. Major Maryland growing countries include the U.S. and Italy. Dark air-cured tobaccos are distinguished from other types primarily by its fermentation process which gives dark air-cured tobacco its medium- to dark-brown colour and distinct aroma. Their leaves have low sugar content but high nicotine content. Dark air-cured tobaccos are mainly used in the production of chewing tobacco and snuff. Major growing regions for dark fire-cured tobaccos are Tennessee, Kentucky, and Virginia, USA.

[0409] The term “functional fragment” as used herein refers to a portion of a polynucleotide that is capable of functioning in the same way as the polynucleotide. For example, if the polynucleotide is an ERF gene then the functional fragment must be capable of functioning as an ERF gene, e.g. the functional fragment retains the activity of the ERF gene. The functional fragment may have a level of activity which is equal to or greater than the level of activity of a full length polynucleotide. In one embodiment a functional fragment may be a portion of a Nic3 gene as discussed herein comprising at least 50, 75, 100, 150, 200, 300, 400, 500, 600, 700, 800, 900 or 1000 contiguous nucleotides. Suitably the functional fragments comprises a domain of the Nic3 gene with SEQ ID No. 75, 120, 127 or 129 as described hereinbefore. In some embodiments the functional fragment may comprise at least 150 nucleotides of a Nic1 ERF discussed herein.

[0410] In one embodiment a functional fragment may be a portion of a Nic1 ERF gene as discussed herein comprising at least 50, 75, 100, 150, 200, 300, 400, 500, 600, 700, 800, 900 or 1000 contiguous nucleotides. In some embodiments the functional fragment may comprise at least 150 nucleotides of a Nic1 ERF discussed herein.

[0411] In one embodiment a functional fragment of a Nic2 ERF gene may be a portion of a Nic2 ERF gene as discussed herein comprising at least 50, 75, 100, 150, 200, 300, 400, 500, 600, 700, 800, 900 or 1000 contiguous nucleotides. In some embodiments the functional fragment may comprise at least 150 nucleotides of a Nic2 ERF discussed herein.

[0412] The term “functional variant” as used herein refers to variability which may arise in genomic sequences without significant loss of activity in either the gene function and/or the protein function. For example some amino acids present in a polypeptide (or some nucleotides present in a polynucleotide) may be substituted without significant loss of activity. The functional variant may have a level of activity which is equal to, or greater than, the level of activity of the non-variant polynucleotide and/or polypeptide. Sequences which differ from the genes disclosed herein due to degeneracy of the genetic code are functional variants. A variant may differ from the sequence of interest by as few as 10, as few as 9, as few as 8, as few as 7 as few as 6, as few as 5, as few as 4, as few as 3, as few as 2 or as few as 1 amino acid(s).

[0413] The term “degeneracy of the genetic code” as used herein refers to the redundancy in codons encoding polypeptide sequences exhibited as the multiplicity of three-codon combinations specifying an amino acid. For example in an mRNA molecule encoding a polypeptide having an isoleucine amino acid, isoleucine can be encoded by AUU, AUC or AUA. This means that a DNA molecule encoding the RNA can have multiple sequences yet the resulting polypeptide will have the same sequence. In other words polymorphic nucleotide sequences can encode the same polypeptide product. This means that one nucleic acid sequence can comprise a sequence with very low sequence identity to a second sequence while encoding the same polypeptide sequence.

[0414] Sequences having a degree of sequence identity or sequence homology with amino acid sequence(s) of a polypeptide having the specific properties described herein or of any nucleotide sequence described herein may be functional variants.

[0415] The term “orthologue” as used herein refers to genes which are derived from a common ancestral gene and which are found in different species as a result of speciation. Orthologues may share at least 70%, 75%, 80%, 85%, 90%, 91%, 92%, 93%, 94%, 95%, 96%, 97%, 98%, 99% or greater sequence identity at the nucleotide sequence and or amino acid sequence level. Orthologous genes often share the same or similar functions i.e. have conserved function.

[0416] In some embodiments of the present invention a promoter may be provided. The promoter for use in the present invention may be one or more selected from the group consisting of: a constitutive promoter, a senescence-specific promoter, a tissue-specific promoter, a developmentally-regulated promoter and an inducible promoter. In one embodiment the promoter may be a constitutive promoter.

[0417] A constitutive promoter directs the expression of a gene throughout the various parts of a plant continuously during plant development, although the gene may not be expressed at the same level in all cell types. Examples of known constitutive promoters include those associated with the cauliflower mosaic virus 35S transcript (Odell J T, Nagy F, Chua N H (1985) Identification of DNA sequences required for activity of the cauliflower mosaic virus 35S promoter, Nature 313 810-2), the rice actin 1 gene (Zhang W, McElroy D, Wu R. (1991) Analysis of rice Act1 5′ region activity in transgenic rice plants (Plant Cell 3 1155-65)) and the maize ubiquitin 1 gene (Cornejo M J, Luth D, Blankenship K M, Anderson O D, Blechl A E. (1993). Activity of a maize ubiquitin promoter in transgenic rice. Plant Molec. Biol. 23 567-81) which are incorporated herein by reference. Constitutive promoters include the Carnation Etched Ring Virus (CERV) promoter. The sequence of carnation etched ring virus DNA: comparison with cauliflower mosaic virus and retroviruses ((Hull R, Sadler J, Longstaff M 1986 EMBO Journal, 5(2):3083-3090) which is incorporated herein by reference).

[0418] The constitutive promoter may be selected from a: a carnation etched ring virus (CERV) promoter, a cauliflower mosaic virus (CaMV 35S promoter), a promoter from the rice actin 1 gene or the maize ubiquitin 1 gene. Suitably the promoter may be a CERV promoter.

[0419] Alternatively in some embodiments the promoter may not be a cauliflower mosaic virus (CaMV 35S promoter). In one embodiment the promoter may be a senescence-specific promoter. A “senescence-specific promoter” (SAG) can be a promoter, which is associated with controlling the expression of a senescence-associated gene. Hence, the promoter can restrict expression of a coding sequence (i.e. a gene) to which it is operably linked substantially exclusively in senescing tissue. Therefore, a senescence-specific promoter can be a promoter capable of preferentially promoting gene expression in a plant tissue in a developmentally-regulated manner such that expression of a 3′ protein-coding region occurs substantially only when the plant tissue is undergoing senescence. It will be appreciated that senescence tends to occur in the older parts of the plant, such as the older leaves, and not in the younger parts of the plants, such as the seeds.

[0420] One example of a plant which is known to express numerous senescence-associated genes is Arabidopsis. Hence, the promoter may be isolated from a senescence-associated gene in Arabidopsis. Gepstein et al. (The Plant Journal, 2003, 36, 629-642), incorporated herein by reference, conducted a detailed study of SAGs and their promoters using Arabidopsis as a model.

[0421] The genetic construct may comprise a promoter from any of the SAGs disclosed in this paper. For example, a suitable promoter may be selected from a group consisting of SAG12, SAG13, SAG101, SAG21 and SAG18, or a functional variant or a functional fragment thereof.

[0422] In one embodiment the promoter may be a SAG12 or a SAG13 promoter. In one embodiment, the promoter may be a SAG12 promoter, which will be known to the skilled technician, or a functional variant or a functional fragment thereof (Gan & Amasino, 1997, Plant Physiology, 113: 313-319, incorporated herein by reference). Suitable promoters and sequences thereof may be found in WO2010/097623 (incorporated herein by reference).

[0423] In another embodiment the promoter may be a tissue-specific promoter. A tissue-specific promoter is one which directs the expression of a gene in one (or a few) parts of a plant, usually throughout the lifetime of those plant parts. The category of tissue-specific promoter commonly also includes promoters whose specificity is not absolute, i.e. they may also direct expression at a lower level in tissues other than the preferred tissue. A number of tissue-specific promoters are known in the art and include those associated with the patatin gene expressed in potato tuber and the high molecular weight glutenin gene expressed in wheat, barley or maize endosperm.

[0424] Any of these promoters may be used in the present invention.

[0425] Suitably the tissue-specific promoter may be a leaf-specific promoter. Suitably leaf-specific promoters may include ASYMMETRIC LEAVES 1 (AS1).

[0426] In a particularly preferred embodiment the tissue-specific promoter is a root-specific promoter.

[0427] In another embodiment the promoter may be a developmentally-regulated promoter. A developmentally-regulated promoter directs a change in the expression of a gene in one or more parts of a plant at a specific time during plant development. The gene may be expressed in that plant part at other times at a different (usually lower) level, and may also be expressed in other plant parts.

[0428] In one embodiment the promoter may be an inducible promoter. An inducible promoter is capable of directing the expression of a gene in response to an inducer. In the absence of the inducer the gene will not be expressed. The inducer may act directly upon the promoter sequence, or may act by counteracting the effect of a repressor molecule. The inducer may be a chemical agent such as a metabolite, a protein, a growth regulator, or a toxic element, a physiological stress such as heat, wounding, or osmotic pressure, or an indirect consequence of the action of a pathogen or pest. A developmentally-regulated promoter might be described as a specific type of inducible promoter responding to an endogenous inducer produced by the plant or to an environmental stimulus at a particular point in the life cycle of the plant. Examples of known inducible promoters include those associated with wound response, such as described by Warner S A, Scott R, Draper J. (1993) (Isolation of an asparagus intracellular PR gene (AoPR1) wound-responsive promoter by the inverse polymerase chain reaction and its characterization in transgenic tobacco. Plant J. 3 191-201), incorporated herein by reference, temperature response as disclosed by Benfey & Chua (1989) (Benfey, P. N., and Chua, N—H. (1989) Regulated genes in transgenic plants. Science 244 174-181), incorporated herein by reference, and chemically induced, as described by Gatz (1995) (Gatz, C. (1995) Novel inducible/repressible gene expression systems. Methods in Cell Biol. 50 411-424), incorporated herein by reference.

[0429] Thus in one embodiment the promoter may be selected from the group consisting of: the CERV promoter, the cauliflower mosaic virus 35S promoter (full or truncated), the rubisco promoter, the pea plastocyanin promoter, the nopaline synthase promoter, the chlorophyll r/b binding promoter, the high molecular weight glutenin promoter, the α, β-gliadin promoter, the hordein promoter and the patatin promoter.

[0430] In one embodiment the promoter may be the CaMV 35S promoter or a modified 35S promoter with a duplicated enhancer region or double enhancer region (R. Kay et al. Science. 1987 Jun. 5; 236(4806):1299-302 which is incorporated herein by reference).

[0431] In one embodiment the promoter may be the native promoter.

[0432] As used herein “native promoter” refers to the promoter which is endogenous to the gene i.e. which is operably linked to the gene in nature.

[0433] The recombinant vector may also comprise DNA coding for a gene that may be used as a selectable marker in the cloning process, i.e. to enable selection of cells that have been transfected or transformed, and to enable the selection of cells harbouring vectors incorporating heterologous DNA. The vector may also comprise DNA involved with regulating expression of the coding sequence, or for targeting the expressed polypeptide to a certain part of the host cell, e.g. the chloroplast. Hence, the vector may comprise at least one additional element selected from a group consisting of: a selectable marker gene (e.g. an antibiotic resistance gene); a polypeptide termination signal; and a protein targeting sequence (e.g. a chloroplast transit peptide).

[0434] Examples of suitable marker genes include antibiotic resistance genes such as those conferring resistance to Kanamycin, Geneticin (G418) and Hygromycin (npt-II, hyg-B); herbicide resistance genes, such as those conferring resistance to phosphinothricin and sulphonamide based herbicides (bar and sul respectively; EP-A-242246, EP-A-0249637), incorporated herein by reference; and screenable markers such as beta-glucuronidase (GB2197653), incorporated herein by reference, luciferase and green fluorescent protein (GFP). The marker gene may be controlled by a second promoter, which allows expression in cells, which may or may not be in the seed, thereby allowing the selection of cells or tissue containing the marker at any stage of development of the plant. Suitable second promoters are the promoter of nopaline synthase gene of Agrobacterium and the promoter derived from the gene which encodes the 35S cauliflower mosaic virus (CaMV) transcript. However, any other suitable second promoter may be used.

[0435] Commercially Desirable Traits

[0436] In one embodiment the plants of the present invention have reduced total alkaloid content and/or reduced content of one or more alkaloids selected from nicotine, nornicotine, anabasine, myosmine and anatabine and/or reduced nicotine, whilst the flavour characteristics and/or other commercially desirable traits are at least maintained. In one embodiment the plants of the present invention produce leaves of a similar grade and/or quality to plants which have not been modified according to the invention.

[0437] In one embodiment the plants of the present invention have reduced nicotine content without a significant change in the flavour characteristics of the plant (e.g. compared with the same plant which has not been modified in accordance with the present invention).

[0438] In one embodiment the plants of the present invention have a reduced nicotine content without a significant change (e.g. decrease) in other commercially desirable traits of the plant (e.g. compared with the same plant which has not been modified in accordance with the present invention). In particular the yield of the modified plant is preferably not reduced compared with the same plant which has not been modified in accordance with the present invention.

[0439] Therefore in one embodiment the methods and uses of the present invention relate to reducing total alkaloid content and/or reducing one or more alkaloids selected from nicotine, nornicotine, anabasine and anatabine and/or reducing nicotine, whilst maintain the flavour characteristics and/or other commercially desirable traits (e.g. yield).

[0440] The term “commercially desirable traits” will include traits such as yield, mature plant height, harvestable leaf number, average node length, cutter leaf length, cutter leaf width, quality, abiotic (for instance drought) stress tolerance, herbicide tolerance and/or biotic (for instance insect, bacteria or fungus) stress tolerance.

[0441] The term “commercially desirable traits” as taught herein will include traits such as drought resistance, pest resistance, mature plant height, harvestable leaf number, average node length, cutter leaf length, cutter leaf width, and yield which are comparable to those said traits in the flue-cured parent of a comparable plant when grown in similar field conditions.

[0442] Unless specified otherwise, used herein, tobacco yield refers to cured leaf yield which is calculated based on the weight of cured tobacco leaves per acre under standard field conditions following standard agronomic and curing practice.

[0443] In one aspect, a plant (e.g. a tobacco plant) of the present invention has a yield between 50% and 150%, between 55% and 145%, between 60% and 140%, between 65% and 135%, between 70% and 130%, between 75% and 125%, between 80% and 120%, between 85% and 115%, between 90% and 110%, between 95% and 105%, between 50% and 100%, between 55% and 100%, between 60% and 100%, between 65% and 100%, between 70% and 100%, between 75% and 100%, between 80% and 100%, between 85% and 100%, between 90% and 100%, between 95% and 100%, between 100% and 150%, between 105% and 150%, between 110% and 150%, between 115% and 150%, between 120% and 150%, between 125% and 150%, between 130% and 150%, between 135% and 150%, between 140% and 150%, or between 145% and 150% of the yield of a comparable plant when grown in similar field conditions.

[0444] In another aspect, the plant (e.g. a tobacco plant) yield of the present invention is approximately 1.5, 1.6, 1.7, 1.8, 1.9, 2.0, 2.1, 2.2, 2.3, 2.4, 2.5, 2.6, 2.7, 2.8, 2.9, or 3.0 times of the yield of a comparable plant when grown in similar field conditions.

[0445] In another aspect, the yield of a tobacco plant of the present invention is comparable to the yield of a comparable plant when grown in similar field conditions.

[0446] In another aspect, the yield of a tobacco plant of the present invention is comparable to the yield of the flue cured comparable plant when grown in similar field conditions.

[0447] In one aspect, a tobacco plant of the present invention provides a yield selected from the group consisting of about between 1200 and 3500, between 1300 and 3400, between 1400 and 3300, between 1500 and 3200, between 1600 and 3100, between 1700 and 3000, between 1800 and 2900, between 1900 and 2800, between 2000 and 2700, between 2100 and 2600, between 2200 and 2500, and between 2300 and 2400 lbs/acre.

[0448] In another aspect, a tobacco plant of the present invention provides a yield selected from the group consisting of about between 1200 and 3500, between 1300 and 3500, between 1400 and 3500, between 1500 and 3500, between 1600 and 3500, between 1700 and 3500, between 1800 and 3500, between 1900 and 3500, between 2000 and 3500, between 2100 and 3500, between 2200 and 3500, between 2300 and 3500, between 2400 and 3500, between 2500 and 3500, between 2600 and 3500, between 2700 and 3500, between 2800 and 3500, between 2900 and 3500, between 3000 and 3500, and between 3100 and 3500 lbs/acre.

[0449] In a further aspect, a tobacco plant of the present invention provides a yield selected from the group consisting of about between 1200 and 3500, between 1200 and 3400, between 1200 and 3300, between 1200 and 3200, between 1200 and 3100, between 1200 and 3000, between 1200 and 2900, between 1200 and 2800, between 1200 and 2700, between 1200 and 2600, between 1200 and 2500, between 1200 and 2400, between 1200 and 2300, between 1200 and 2200, between 1200 and 2100, between 1200 and 2000, between 1200 and 1900, between 1200 and 1800, between 1200 and 1700, between 1200 and 1600, between 1200 and 1500, and between 1200 and 1400 lbs/acre.

[0450] Tobacco Plants

[0451] The present invention provides methods, uses directed to plants (e.g. tobacco plants) as well as a cell (e.g. a tobacco cell), a plant (e.g. a tobacco plant) and a plant propagation material.

[0452] The term “tobacco” as used herein refers to a plant in the genus Nicotiana that is used in the production of delivery systems. Non-limiting examples of suitable “tobacco” plants include N. tabacum and N. rustica (for example, N. tabacum L., LA B21, LN KY171, TI 1406, Basma, Galpao, Perique, Beinhart 1000-1, and Petico).

[0453] In one embodiment a suitable tobacco plant may be any N. tabacum germplasm, line or variety.

[0454] In another embodiment a suitable tobacco plant may be a non tabacum species.

[0455] The tobacco material can be derived or obtained from varieties of Nicotiana tabacum types, commonly known as Burley varieties, flue or bright varieties and dark varieties. In some embodiments, the tobacco material is derived from a Burley, Virginia or a dark tobacco plant. The tobacco plant may be selected from Burley tobacco, rare tobacco, specialty tobacco, expanded tobacco or the like.

[0456] The use of tobacco cultivars and elite tobacco cultivars is also contemplated herein. The tobacco plant for use herein may therefore be a tobacco variety or elite tobacco cultivar. Particularly useful Nicotiana tabacum varieties include Flue-cured Virginia type, Burley type, and Oriental type.

[0457] In some embodiments, the tobacco plant may be, for example, selected from one or more of the following varieties: L. cultivar T.I. 1068, AA 37-1, B 13P, Xanthi (Mitchell-Mor), KT D #3 Hybrid 107, Bel-W3, 79-615, Samsun Holmes N N, F4 from cross BU21×Hoja Parado, line 97, KTRDC #2 Hybrid 49, KTRDC #4 Hybrid 1 10, Burley 21, PM016, KTRDC #5 KY 160 SI, KTRDC #7 FCA, KTRDC #6 TN 86 SI, PM021, K 149, K 326, K 346, K 358, K 394, K 399, K 730, KY 10, KY 14, KY 160, KY 17, KY 8959, KY 9, KY 907, MD 609, McNair 373, NC 2000, PG 01, PG 04, P01, P02, P03, RG 11, RG 17, RG 8, Speight G-28, TN 86, TN 90, VA 509, AS44, Banket A1, Basma Drama B84/31, Basma I Zichna ZP4/B, Basma Xanthi BX 2A, Batek, Besuki Jember, C104, Coker 319, Coker 347, Criollo Misionero, PM092, Delcrest, Djebel 81, DVH 405, Galpao Comum, HBO4P, Hicks Broadleaf, Kabakulak Elassona, PM102, Kutsage E1, KY 14×L8, KY 171, LA BU 21, McNair 944, NC 2326, NC 71, NC 297, NC 3, PVH 03, PVH 09, PVH 19, PVH 21 10, Red Russian, Samsun, Saplak, Simmaba, Talgar 28, PM132, Wislica, Yayaldag, NC 4, TR Madole, Prilep HC-72, Prilep P23, Prilep PB 156/1, Prilep P12-2/1, Yaka JK-48, Yaka JB 125/3, TI-1068, KDH-960, TI-1070, TW136, PM204, PM205, Basma, TKF 4028, L8, TKF 2002, TN 90, GR141, Basma xanthi, GR149, GR153, and Petit Havana.

[0458] Non-limiting examples of varieties or cultivars are: BD 64, CC 101, CC 200, CC 27, CC 301, CC 400, CC 500, CC 600, CC 700, CC 800, CC 900, Coker 176, Coker 319, Coker 371 Gold, Coker 48, CD 263, DF91 1, DT 538 LC, Galpao tobacco, GL 26H, GL 350, GL 600, GL 737, GL 939, GL 973, HB 04P, HB 04P LC, HB3307PLC, Hybrid 403LC, Hybrid 404LC, Hybrid 501 LC, K 149, K 326, K 346, K 358, K394, K 399, K 730, KDH 959, KT 200, KT204LC, KY10, KY14, KY 160, KY 17, KY 171, KY 907, KY907LC, KTY14×L8 LC, Little Crittenden, McNair 373, McNair 944, msKY 14×L8, Narrow Leaf Madole, Narrow Leaf Madole LC, NBH 98, N-126, N-777LC, N-7371 LC, NC 100, NC 102, NC 2000, NC 291, NC 297, NC 299, NC 3, NC 4, NC 5, NC 6, NC7, NC 606, NC 71, NC 72, NC 810, NC BH 129, NC 2002, Neal Smith Madole, OXFORD 207, PD 7302 LC, PD 7309 LC, PD 7312 LC ‘Periq'e’ tobacco, PVH03, PVH09, PVH19, PVH50, PVH51, R 610, R 630, R 7-1 1, R 7-12, RG 17, RG 81, RG H51, RGH 4, RGH 51, RS 1410, Speight 168, Speight 172, Speight 179, Speight 210, Speight 220, Speight 225, Speight 227, Speight 234, Speight G-28, Speight G-70, Speight H-6, Speight H20, Speight NF3, TI 1406, TI 1269, TN 86, TN86LC, TN 90, TN 97, TN97LC, TN D94, TN D950, TR (Tom Rosson) Madole, VA 309, VA359, AA 37-1, B 13P, Xanthi (Mitchell-Mor), Bel-W3, 79-615, Samsun Holmes NN, KTRDC number 2 Hybrid 49, Burley 21, KY 8959, KY 9, MD 609, PG 01, PG 04, P01, P02, P03, RG 1 1, RG 8, VA 509, AS44, Banket A1, Basma Drama B84/31, Basma I Zichna ZP4/B, Basma Xanthi BX 2A, Batek, Besuki Jember, C104, Coker 347, Criollo Misionero, Delcrest, Djebel 81, DVH 405, Galpao Comum, HBO4P, Hicks Broadleaf, Kabakulak Elassona, Kutsage E1, LA BU 21, NC 2326, NC 297, PVH 21 10, Red Russian, Samsun, Saplak, Simmaba, Talgar 28, Wislica, Yayaldag, Prilep HC-72, Prilep P23, Prilep PB 156/1, Prilep P12-2/1, Yaka JK-48, Yaka JB 125/3, TI-1068, KDH-960, TI-1070, TW136, Basma, TKF 4028, L8, TKF 2002, GR141, Basma xanthi, GR149, GR153, Petit Havana. Low converter subvarieties of the above, even if not specifically identified herein, are also contemplated.

[0459] The plant may be a hybrid produced by crossing any varieties disclosed herein.

[0460] The tobacco plant may be a Burley, Flue-cured Virginia, or Oriental.

[0461] In one embodiment the plant propagation material may be obtainable from a plant (e.g. a tobacco plant) of the invention. A “plant propagation material” as used herein refers to any plant matter taken from a plant from which further plants may be produced. Suitably the plant propagation material may be a seed. Suitably the plant propagation material may be pollen.

[0462] In one embodiment the cell (e.g. a tobacco cell), plant (e.g. a tobacco plant) or part thereof and/or plant propagation material of the invention may comprise modulated activity or expression of a Nic3 gene (or a Nic3 gene and a Nic1 ERF gene and/or a Nic2 ERF gene). In another embodiment the cell (e.g. tobacco cell), plant (e.g. tobacco plant) and/or plant propagation material may comprise a construct or vector according to the invention. In another embodiment the cell (e.g. tobacco cell), plant (e.g. tobacco plant) and/or plant propagation material may be obtainable (e.g. obtained) by a method according to the invention.

[0463] Suitably a plant (e.g. a tobacco plant) or part thereof according to the present invention may comprise modulated activity or expression of a Nic3 ERF gene (or a Nic3 gene and a Nic1 ERF gene and/or a Nic2 ERF gene), when compared to a plant (e.g. a tobacco plant) or part thereof that has not been modified to modulate the activity or expression of a Nic3 gene (or a Nic3 gene and a Nic1 ERF gene and/or a Nic2 ERF gene).

[0464] In one embodiment the plant (e.g. tobacco plant) or part thereof in accordance with the present invention comprises a cell (e.g. a tobacco cell) of the invention. In another embodiment the plant propagation material may be obtainable (e.g. obtained) from a plant (e.g. a tobacco plant) of the invention.

[0465] In one embodiment there is provided the use of a cell (e.g. a tobacco cell) as provided for in the foregoing embodiments for production of a product (e.g. a delivery system). Additionally, there is provided the use of a plant (e.g. a tobacco plant) as described herein to breed a plant (e.g. a tobacco plant).

[0466] The present invention also provides in another embodiment the use of a plant (e.g. a tobacco plant) of the foregoing embodiments for the production of a product (e.g. a delivery system). In another embodiment there is provided the use of a plant (e.g. a tobacco plant) of the invention to grow a crop. In one embodiment the use of a Nic3 gene (or a Nic3 gene and a Nic1 ERF gene and/or a Nic2 ERF gene) according to the present invention results in modulation of the alkaloid content of a plant (e.g. a tobacco plant).

[0467] In one embodiment the method or use of a Nic3 gene (or a Nic3 gene and a Nic1 ERF gene and/or a Nic2 ERF gene) according to the present invention may result in the modulation of the alkaloid content. In another embodiment the use of a Nic3 gene (or a Nic3 gene and a Nic1 ERF gene and/or a Nic2 ERF gene) (e.g. decreased activity or expression thereof) may result in a decrease in content of one or more alkaloids. Suitably the content of one or more of anatabine, anabasine, myosmine, nornicotine or nicotine may be reduced. Suitably the nicotine content is reduced. Suitably this may be observed when Nic3 gene activity or expression (or activity of a Nic3 gene and a Nic1 ERF gene and/or a Nic2 ERF gene), is decreased compared to wild type plants.

[0468] In another embodiment the method or use of a Nic3 gene (or a Nic3 gene and a Nic1 ERF gene and/or a Nic2 ERF gene) (e.g. increased activity or expression thereof) may result in an increase in content of one or more alkaloids. Suitably the content of one or more of anatabine, anabasine, nornicotine or nicotine may be increased. Suitably the nicotine content is reduced.

[0469] In one embodiment the plant (e.g. tobacco plant) or part thereof, e.g. the leaf, or harvested leaf or harvested processed leaf, or cells or products (e.g. delivery systems) comprise a modified (e.g. mutated or deleted) Nic3 gene of the present invention (or a modified (e.g. mutated or deleted) Nic3 gene in combination with a modified (e.g. mutated or deleted) Nic1 ERF gene and/or a modified (e.g. mutated or deleted) Nic2 ERF gene in accordance with the present invention).

[0470] In one embodiment the present invention provides a tobacco cell culture (e.g. in in vitro culture).

[0471] The tobacco cell culture may be a tobacco cell suspension culture. These tobacco cells cultured in vitro may be incorporated into a delivery system, e.g. as a substitute for conventional tobacco particles, shreds, fine cut or long cut tobacco lamina, as an additive ingredient or as both a substitute and an additive.

[0472] In one embodiment there is provided the use of a tobacco cell culture, e.g. a harvested and/or processed tobacco cell culture, or an extract therefrom according to the present invention for the production of a delivery system.

[0473] The tobacco cells harvested from an in vitro culture may be dried, e.g. freeze-dried, for example to produce a powder.

[0474] The skilled person will be aware of known methods for establishing in vitro cultures of tobacco cells. By way of example only the following method may be used: collecting seeds from a tobacco plant of interest and sterilising their exterior to eliminate unwanted organisms, planting said seeds to grown a tobacco plant of interest, removing tissue from the tobacco plant (for example, from the tobacco stem) for use as an explant, establishing a callus culture form the tobacco explant, establishing a cell suspension culture from the callus culture, and harvesting culture material (e.g. including tobacco cells) to produce a tobacco cell culture.

[0475] The tobacco cells can be harvested by various methods, including filtration, e.g. vacuum filtration. The sample may be washed in the filter by adding water and the remaining liquid removed with the filtration, e.g. vacuum filtration.

[0476] The harvested tobacco cell culture may be further processed, e.g. dried, such as air-dried and/or freeze-dried. The harvested tobacco cell culture or dried harvested tobacco cell culture or an extract therefrom may be incorporated into delivery systems according to the present invention.

[0477] In one embodiment, the present invention provides a tobacco plant or part thereof for use in molecular farming. Suitably, a plant or part thereof modified in accordance with the present invention may be used in the manufacture of proteins such as therapeutics e.g. antibiotics, virus like particles, neutraceuticals or small molecules.

[0478] In one embodiment, the present invention provides a method for the production of proteins (e.g. therapeutic proteins); the method comprising modifying a plant or part thereof capable of producing said protein (e.g. therapeutic protein) by modulating the activity or expression of at least one Nic3 ERF gene; or at least one Nic3 gene and at least one Nic1 ERF gene and/or at least one Nic2 ERF gene as described herein and culturing the plant under conditions sufficient to allow the production of said protein (e.g. therapeutic protein).

[0479] In one aspect, the present invention provides a method of introgressing a low nicotine trait into a tobacco variety, the method comprising,

[0480] a) crossing a first tobacco variety comprising g a low nicotine trait with a second tobacco variety without the low nicotine trait to produce one or more progeny tobacco plants;

[0481] b) genotyping the one or more progeny tobacco plants for a polymorphic marker linked to the low nicotine trait, there the polymorphic marker is within 20 cM, 10 cM, 5 cM, 4 cM, 3 cM, 2 cM, 1 cM 0.5 cM or less than 0.5 cM of a Nic3 locus; and

[0482] c) selecting a progeny tobacco plant comprising the low nicotine trait.

[0483] In an aspect this method optionally comprises selecting simultaneously or concurrently for one of more molecular markers associated with or closely linked to a Nic1 locus and/or one or more molecular markers associated with or closely linked to a Nic2 locus.

[0484] Products

[0485] The present invention also provides for products obtainable or obtained from tobacco according to the present invention. Products are provided which are obtainable or obtained from a tobacco plant in which Nic3 gene activity or expression (or activity or expression of a Nic3 gene and Nic1 ERF gene and/or a Nic2 ERF gene) has been modulated and which comprises modulated alkaloid content (e.g. reduced nicotine content).

[0486] In one aspect, the present invention comprises a delivery system comprising a tobacco plant or part thereof or plant cell according to the invention;

[0487] a tobacco plant or part thereof propagated from a tobacco plant propagation material according to the invention; a harvested leaf of a plant according to the invention; a processed leaf according to the invention; or a plant produced by the method according to the invention.

[0488] As used herein, the term “delivery system” is intended to encompass systems that deliver at least one substance to a user, and includes:

[0489] combustible aerosol provision systems, such as cigarettes, cigarillos, cigars, and tobacco for pipes or for roll-your-own or for make-your-own cigarettes (whether based on tobacco, tobacco derivatives, expanded tobacco, reconstituted tobacco, tobacco substitutes or other smokable material);

[0490] non-combustible aerosol provision systems that release compounds from an aerosol-generating material without combusting the aerosol-generating material, such as electronic cigarettes, tobacco heating products, and hybrid systems to generate aerosol using a combination of aerosol-generating materials; and

[0491] aerosol-free delivery systems that deliver the at least one substance to a user orally, nasally, transdermally or in another way without forming an aerosol, including but not limited to, lozenges, gums, patches, articles comprising inhalable powders, and oral products such as oral tobacco which includes snus or moist snuff, wherein the at least one substance may or may not comprise nicotine.

[0492] According to the present disclosure, a “combustible” aerosol provision system is one where a constituent aerosol-generating material of the aerosol provision system (or component thereof) is combusted or burned during use in order to facilitate delivery of at least one substance to a user.

[0493] In some embodiments, the delivery system is a combustible aerosol provision system, such as a system selected from the group consisting of a cigarette, a cigarillo and a cigar.

[0494] In some embodiments, the disclosure relates to a component for use in a combustible aerosol provision system, such as a filter, a filter rod, a filter segment, a tobacco rod, a spill, an aerosol-modifying agent release component such as a capsule, a thread, or a bead, or a paper such as a plug wrap, a tipping paper or a cigarette paper.

[0495] According to the present disclosure, a “non-combustible” aerosol provision system is one where a constituent aerosol-generating material of the aerosol provision system (or component thereof) is not combusted or burned in order to facilitate delivery of at least one substance to a user.

[0496] In some embodiments, the delivery system is a non-combustible aerosol provision system, such as a powered non-combustible aerosol provision system.

[0497] In some embodiments, the non-combustible aerosol provision system is an electronic cigarette, also known as a vaping device or electronic nicotine delivery system (END), although it is noted that the presence of nicotine in the aerosol-generating material is not a requirement.

[0498] In some embodiments, the non-combustible aerosol provision system is an aerosol-generating material heating system, also known as a heat-not-burn system. An example of such a system is a tobacco heating system.

[0499] In some embodiments, the non-combustible aerosol provision system is a hybrid system to generate aerosol using a combination of aerosol-generating materials, one or a plurality of which may be heated. Each of the aerosol-generating materials may be, for example, in the form of a solid, liquid or gel and may or may not contain nicotine. In some embodiments, the hybrid system comprises a liquid or gel aerosol-generating material and a solid aerosol-generating material. The solid aerosol-generating material may comprise, for example, tobacco or a non-tobacco product.

[0500] Typically, the non-combustible aerosol provision system may comprise a non-combustible aerosol provision device and a consumable for use with the non-combustible aerosol provision device.

[0501] In some embodiments, the disclosure relates to consumables comprising aerosol-generating material and configured to be used with non-combustible aerosol provision devices. These consumables are sometimes referred to as articles throughout the disclosure.

[0502] In some embodiments, the non-combustible aerosol provision system, such as a non-combustible aerosol provision device thereof, may comprise a power source and a controller.

[0503] The power source may, for example, be an electric power source or an exothermic power source. In some embodiments, the exothermic power source comprises a carbon substrate which may be energised so as to distribute power in the form of heat to an aerosol-generating material or to a heat transfer material in proximity to the exothermic power source.

[0504] In some embodiments, the non-combustible aerosol provision system may comprise an area for receiving the consumable, an aerosol generator, an aerosol generation area, a housing, a mouthpiece, a filter and/or an aerosol-modifying agent.

[0505] In some embodiments, the consumable for use with the non-combustible aerosol provision device may comprise aerosol-generating material, an aerosol-generating material storage area, an aerosol-generating material transfer component, an aerosol generator, an aerosol generation area, a housing, a wrapper, a filter, a mouthpiece, and/or an aerosol-modifying agent.

[0506] Suitably, the delivery system may be prepared from (e.g. may comprise) a tobacco plant or a part thereof according to the present invention.

[0507] Suitably, the delivery system may be prepared from a tobacco cell culture according to the present invention.

[0508] Suitably, the delivery system may be prepared from (e.g. may comprise) a tobacco plant or part thereof propagated from a tobacco plant propagation material according to the present invention.

[0509] Suitably, the delivery system may be prepared from (e.g. may comprise) a harvested leaf of a tobacco plant according to the present invention.

[0510] Suitably, the delivery system may be prepared from (e.g. may comprise) a processed tobacco leaf according to the present invention.

[0511] Suitably, the delivery system may be prepared from (e.g. may comprise) a cured tobacco material according to the present invention.

[0512] Suitably, the delivery system may be prepared from (e.g. may comprise) a tobacco blend according to the present invention.

[0513] In one embodiment, the delivery system is a combustible smoking article, selected from the group consisting of a cigarette, a cigarillo and a cigar.

[0514] In one embodiment, the delivery system comprises one or more components of a combustible smoking article, such as a filter, a filter rod, a filter rod segments, tobacco, a tobacco rod, a tobacco rod segment, a spill, an additive release component such as a capsule, a thread, beads, a paper such as a plug wrap, a tipping paper or a cigarette paper.

[0515] In one embodiment, the delivery system is a non-combustible aerosol provision system.

[0516] In one embodiment, the delivery system comprises one or more components of a non-combustible aerosol provision system, such as a heater and an aerosolizable substrate.

[0517] In one embodiment, the aerosol provision system is an electronic cigarette also known as a vaping device.

[0518] In one embodiment the electronic cigarette comprises a heater, a power supply capable of supplying power to the heater, an aerosolizable substrate such as a liquid or gel, a housing and optionally a mouthpiece.

[0519] In one embodiment the aerosolizable substrate is contained in a substrate container. In one embodiment the substrate container is combined with or comprises the heater.

[0520] In one embodiment, the delivery system is a heating product which releases one or more compounds by heating, but not burning, a substrate material. The substrate material is an aerosolizable material which may be for example tobacco or other non-delivery systems, which may or may not contain nicotine. In one embodiment, the heating product is a tobacco heating product.

[0521] In one embodiment, the heating product is an electronic device.

[0522] In one embodiment, the tobacco heating product comprises a heater, a power supply capable of supplying power to the heater, an aerosolizable substrate such as a solid or gel material.

[0523] In one embodiment the heating product is a non-electronic article.

[0524] In one embodiment the heating product comprises an aerosolizable substrate such as a solid or gel material and a heat source which is capable of supplying heat energy to the aerosolizable substrate without any electronic means, such as by burning a combustion material, such as charcoal.

[0525] In one embodiment the heating product also comprises a filter capable of filtering the aerosol generated by heating the aerosolizable substrate.

[0526] In some embodiments the aerosolizable substrate material may comprise a vapour or aerosol generating agent or a humectant, such as glycerol, propylene glycol, triacetin or diethylene glycol.

[0527] In one embodiment, the delivery system is a hybrid system to generate aerosol by heating, but not burning, a combination of substrate materials. The substrate materials may comprise for example solid, liquid or gel which may or may not contain nicotine. In one embodiment, the hybrid system comprises a liquid or gel substrate and a solid substrate. The solid substrate may be for example tobacco or other non-delivery systems, which may or may not contain nicotine. In one embodiment, the hybrid system comprises a liquid or gel substrate and tobacco.

[0528] In another embodiment, the product may comprise a construct of the invention which modulates activity or expression of at least one Nic3 gene and thereby decreases alkaloid content (e.g. nicotine content) when expressed in a plant (e.g. tobacco plant).

[0529] In another embodiment, the product may comprise one or more constructs of the invention which modulates Nic3 gene activity or expression (or Nic3 gene activity or expression and Nic1 ERF gene activity or expression and/or Nic2 ERF gene activity or expression) wherein said product has modulated alkaloid content (e.g. reduced nicotine content).

[0530] In one embodiment there is provided the use of a plant of the invention (e.g. a tobacco plant) to produce leaf (e.g. tobacco leaf). Suitably the leaf (e.g. tobacco leaf) may be subjected to downstream applications such as processing. Thus in one embodiment the use of the foregoing embodiment may provide a processed leaf (e.g. a processed tobacco leaf). Suitably the tobacco leaf may be subjected to curing, fermenting, pasteurising or combinations thereof.

[0531] In another embodiment the leaf (e.g. tobacco leaf) may be cut. In some embodiments the leaf (e.g. tobacco leaf) may be cut before or after being subjected to curing, fermenting, pasteurising or combinations thereof.

[0532] In one embodiment the present invention provides a harvested leaf of a plant of the invention (e.g. a tobacco plant). In one embodiment the harvested leaf may be obtainable from a plant (e.g. a tobacco plant) which has modulated Nic3 gene activity or expression (or modulated Nic3 and Nic1 ERF and/or Nic2 ERF gene activity or expression). Suitably the harvested leaf has modulated alkaloid content. In a further embodiment the harvested leaf may be obtainable (e.g. obtained) from a plant (e.g. a tobacco plant) propagated from a propagation material of the present invention. In another embodiment there is provided a harvested leaf obtainable from a method or use of the present invention. Suitably the harvested leaf may be a cut harvested leaf. In some embodiments the harvested leaf may comprise viable cells (e.g. viable tobacco cells). In some embodiments the harvest leaf does not comprise viable cells (e.g. viable tobacco cells). In other embodiments the harvested leaf may be subjected to further processing.

[0533] Some tobacco plants may be harvested by cutting the stalks and harvesting all of the leaves simultaneously (e.g. as with burley tobacco). Other tobacco plants (e.g. flue cured tobacco) may be harvested in stages in a process such as priming, wherein individual leaves are removed from the stalk as they ripen.

[0534] As used herein “priming” refers to the removal of leaves from tobacco plants. This may refer to the removal of mature or ripe leaves of flue cured plants.

[0535] There is also provided a processed leaf (e.g. a processed tobacco leaf). The processed leaf (e.g. processed tobacco leaf) may be obtainable from a plant of the invention (e.g. tobacco plant).

[0536] Suitably the processed leaf may be obtainable from a plant obtained in accordance with any of the methods and/or uses of the present invention. In one embodiment the processed leaf (e.g. processed tobacco leaf) may be obtainable from a plant (e.g. tobacco plant) which has modulated Nic3 gene activity or expression (or Nic3 and Nic1 ERF gene and/or Nic2 ERF gene activity or expression) and modulated alkaloid content, preferably when compared to a control leaf i.e. compared to a leaf from a plant (e.g. tobacco plant) which has not been modified according to the invention. The processed leaf (e.g. processed tobacco leaf) may comprise a modulation in Nic3 gene activity or expression (or Nic3 and Nic1 ERF gene and/or a Nic2 ERF gene activity or expression) and modulated alkaloid content.

[0537] In another embodiment the processed leaf (e.g. processed tobacco leaf) may be obtainable from a plant (e.g. tobacco plant) propagated from a plant (e.g. tobacco plant) propagation material according to the present invention. The processed leaf (e.g. processed tobacco leaf) of the present invention is obtainable by processing a harvested leaf of the invention.

[0538] The term “processed leaf” as used herein refers to a leaf that has undergone one or more processing steps to which leaves are subjected to in the art. A “processed leaf” comprises no or substantially no viable cells.

[0539] The term “processed tobacco leaf” as used herein refers to a tobacco leaf that has undergone one or more processing steps to which tobacco is subjected to in the art. A “processed tobacco leaf” comprises no or substantially no viable cells.

[0540] The term “viable cells” refers to cells which are able to grow and/or are metabolically active. Thus, if a cell is said to not be viable, also referred to as “non-viable” then a cell does not display the characteristics of a viable cell.

[0541] The term “substantially no viable cells” means that less than about 5% of the total cells are viable. Preferably, less than about 3%, more preferably less than about 1%, even more preferably less than about 0.1% of the total cells are viable.

[0542] In one embodiment the processed tobacco leaf may be processed by one or more of: curing, fermenting and/or pasteurising. Suitably the processed tobacco leaf may be processed by curing.

[0543] Tobacco leaf may be cured by any method known in the art. In one embodiment tobacco leaf may be cured by one or more of the curing methods selected from the group consisting of: air curing, fire curing, flue curing and sun curing. Suitably the tobacco leaf may be air cured. Suitably the tobacco leaf may be flue cured.

[0544] Typically air curing is achieved by hanging tobacco leaf in well-ventilated barns and allowing to dry. This is usually carried out over a period of four to eight weeks. Air curing is especially suitable for Burley tobacco.

[0545] Suitably the tobacco leaf may be fire cured. Fire curing is typically achieved by hanging tobacco leaf in large barns where fires of hardwoods are kept on continuous or intermittent low smoulder and usually takes between three days and ten weeks, depending on the process and the tobacco.

[0546] In another embodiment the tobacco leaf may be flue cured. Flue curing may comprise stringing tobacco leaves onto tobacco sticks and hanging them from tier-poles in curing barns. The barns usually have a flue which runs from externally fed fire boxes. Typically this results in tobacco that has been heat-cured without being exposed to smoke. Usually the temperature will be raised slowly over the course of the curing with the whole process taking approximately 1 week.

[0547] Suitably the tobacco leaf may be sun cured. This method typically involves exposure of uncovered tobacco to the sun.

[0548] Suitably the processed tobacco leaf may be processed by fermenting. Fermentation can be carried out in any manner known in the art. Typically during fermentation, the tobacco leaves are piled into stacks (a bulk) of cured tobacco covered in e.g. burlap to retain moisture. The combination of the remaining water inside the leaf and the weight of the tobacco generates a natural heat which ripens the tobacco. The temperature in the centre of the bulk is monitored daily. In some methods every week, the entire bulk is opened. The leaves are then removed to be shaken and moistened and the bulk is rotated so that the inside leaves go outside and the bottom leaves are placed on the top of the bulk. This ensures even fermentation throughout the bulk. The additional moisture on the leaves, plus the actual rotation of the leaves themselves, generates heat, releasing the tobacco's natural ammonia and reducing nicotine, while also deepening the colour and improving the tobacco's aroma. Typically the fermentation process continues for up to 6 months, depending on the variety of tobacco, stalk position on the leaf, thickness and intended use of leaf.

[0549] Suitably the processed tobacco leaf may be processed by pasteurising. Pasteurising may be particularly preferred when the tobacco leaf will be used to make a smokeless delivery system, most preferably snus. Tobacco leaf pasteurisation may be carried out by any method known in the art. For example, pasteurisation may be carried out as detailed in J Foulds, L Ramstrom, M Burke, K Fagerstrom. Effect of smokeless tobacco (snus) on smoking and public health in Sweden. Tobacco Control (2003) 12: 349-359, the teaching of which is incorporated herein by reference.

[0550] During the production of snus, pasteurisation is typically carried out by a process in which the tobacco is heat treated with steam for 24-36 hours (reaching temperatures of approximately 100° C.). This results in an almost sterile product and without wishing to be bound by theory one of the consequences of this is believed to be a limitation of further TSNA formation.

[0551] In one embodiment the pasteurisation may be steam pasteurisation.

[0552] In some embodiments the processed tobacco leaf may be cut. The processed tobacco leaf may be cut before or after processing. Suitably, the processed tobacco leaf may be cut after processing.

[0553] In some embodiments the tobacco plant, harvested leaf of a tobacco plant and/or processed tobacco leaf may be used to extract nicotine. The extraction of nicotine can be achieved using any method known in the art. For example, a method for extracting nicotine from tobacco is taught in U.S. Pat. No. 2,162,738 which is incorporated herein by reference.

[0554] In one aspect, the present invention provides cured tobacco material made from a tobacco plant or part thereof according to the invention.

[0555] In another aspect, the present invention provides a tobacco blend comprising tobacco material made from a tobacco plant or part thereof according to the present invention. In one aspect, the present invention provides a tobacco blend comprising cured tobacco material according to the present invention.

[0556] Suitably, the tobacco blend according to the present invention may comprise approximately 10%, 20%, 30%, 40%, 50%, 60%, 70%, 80% or 90% tobacco from a tobacco plant or part thereof according to the present invention. Suitably, the tobacco blend may comprise approximately 10% tobacco from a tobacco plant or part thereof according to the present invention. Suitably, the tobacco blend may comprise approximately 20% tobacco from a tobacco plant or part thereof according to the present invention. Suitably, the tobacco blend may comprise approximately 30% tobacco from a tobacco plant or part thereof according to the present invention. Suitably, the tobacco blend may comprise approximately 40% tobacco from a tobacco plant or part thereof according to the present invention. Suitably, the tobacco blend may comprise approximately 50% tobacco from a tobacco plant or part thereof according to the present invention. Suitably, the tobacco blend may comprise approximately 60% tobacco from a tobacco plant or part thereof according to the present invention. Suitably, the tobacco blend may comprise approximately 70% tobacco from a tobacco plant or part thereof according to the present invention. Suitably, the tobacco blend may comprise approximately 80% tobacco from a tobacco plant or part thereof according to the present invention. Suitably, the tobacco blend may comprise approximately 90% tobacco from a tobacco plant or part thereof according to the present invention.

[0557] In one aspect, a tobacco blend product of the present invention comprises at least about 5, 10, 20, 30, 40, 50, 60, 70, 80, 90, or 95 percent by dry weight of tobacco cured from a tobacco plant or part thereof according to the present invention.

[0558] Suitably the cured tobacco material may be air cured. Suitably the cured tobacco material may be flue cured. Suitably the cured tobacco material may be sun cured.

[0559] A delivery system or smoking article according to the present invention may comprise the tobacco material (e.g. cured tobacco material) according to the present invention.

[0560] In another aspect the present invention provides a delivery system. Suitably, a delivery system may be a blended delivery system. In one embodiment the delivery system may be prepared from a tobacco plant of the invention or a part thereof. In one embodiment the delivery system may be prepared from a tobacco plant which has modulated Nic3 gene activity or expression or Nic3 gene and Nic1 ERF gene and/or Nic2 ERF gene activity or expression. The delivery system may comprise a reduction in Nic1 ERF gene activity or expression and reduced alkaloid content. Suitably the tobacco plant or part thereof may be propagated from a tobacco plant propagation material according to the present invention.

[0561] The term “part thereof” as used herein in the context of a plant (e.g. a tobacco plant) refers to a portion of the plant (e.g. tobacco plant). Preferably the “part thereof” is a leaf of a plant (e.g. of a tobacco plant).

[0562] In another embodiment the delivery system may be prepared from a harvested leaf of the invention. In a further embodiment the delivery system may be prepared from a processed tobacco leaf of the invention. Suitably the delivery system may be prepared from a tobacco leaf processed by one or more of: curing, fermenting and/or pasteurising. Suitably the delivery system may comprise a cut tobacco leaf, optionally processed as per the foregoing embodiment.

[0563] In one embodiment the delivery system may be a smoking article. As used herein, the term “smoking article” can include smokeable products, such as rolling tobacco, cigarettes, cigars and cigarillos whether based on tobacco, tobacco derivatives, expanded tobacco, reconstituted tobacco or tobacco substitutes.

[0564] In another embodiment the delivery system may be a smokeless delivery system. The term “smokeless delivery system” as used herein refers to a delivery system that is not intended to be smoked and/or subjected to combustion. In one embodiment a smokeless delivery system may include snus, snuff, chewing tobacco or the like.

[0565] In a further embodiment the delivery system may be a tobacco heating device or hybrid device or e-cigarettes or the like. Typically in heating devices or hybrid devices, an aerosol is generated by the transfer of heat from a heat source to a physically separate aerosol-forming substrate or material, which may be located within, around or downstream of the heat source. During smoking, volatile compounds are released from the aerosol-forming substrate by heat transfer from the heat source and entrained in air drawn through the smoking article. As the released compounds cool, they condense to form an aerosol that is inhaled by the user.

[0566] Aerosol-generating articles and devices for consuming or smoking tobacco heating devices are known in the art. They can include, for example, electrically heated aerosol-generating devices in which an aerosol is generated by the transfer of heat from one or more electrical heating elements of the aerosol-generating device to the aerosol-forming substrate of a tobacco heating device. Suitably the tobacco heating device may be an aerosol-generating device.

[0567] Preferably the tobacco heating device may be a heat-not-burn device. Heat-not-burn devices are known in the art and release compounds by heating, but not burning, tobacco. An example of a suitable, heat-not-burn device may be one taught in WO2013/034459 or GB2515502 which are incorporated herein by reference.

[0568] In one embodiment the aerosol-forming substrate of a tobacco heating device may be a delivery system in accordance with the present invention.

[0569] In one embodiment the tobacco heating device may be a hybrid device.

[0570] Molecular Farming

[0571] The present invention may be particularly useful in the field of plant molecular farming, where plants, or parts thereof or plant cells (such as tobacco and other Nicotiana spp.) are used for the production of proteins, peptides, and metabolites e.g. for the production of therapeutics and pharmaceuticals such as antibiotics, virus like particles, or neutraceuticals or small molecules.

[0572] As used herein “molecular farming” relates to the production of recombinant proteins and/or other secondary metabolites in plants, or parts thereof or plant cells.

[0573] Suitably, molecular farming (or biopharming) may comprise modifying a plant or part thereof or plant cell by introducing a nucleic acid sequence which encodes a recombinant protein and cultivating said plant or part thereof or plant cell comprising the nucleic acid sequence under conditions which allow the expression of said recombinant protein. Suitably, the method may further comprise and extraction and optionally, purification of the recombinant protein from the plant or part thereof or plant cell. Suitably, molecular farming (or biopharming) may comprise modifying a plant or part thereof or plant cell by introducing a nucleic acid sequence which encodes a recombinant protein, cultivating said plant or part thereof or plant cell comprising the nucleic acid sequence under conditions which allow the expression of said recombinant protein, and extraction and purification of the recombinant protein from the plant or part thereof or plant cell.

[0574] Suitably, molecular farming (or biopharming) may comprise cultivating a plant or part thereof or plant cell under conditions which allow the expression of a secondary metabolite. Suitably, the method may further comprise and extraction and optionally, purification of the secondary metabolite from the plant or part thereof or plant cell. Suitably, molecular farming (or biopharming) may comprise cultivating a plant or part thereof or plant cell under conditions which allow the expression of a secondary metabolite, and extraction and purification of the recombinant protein from the plant or part thereof or plant cell.

[0575] Methods for extracting and purifying recombinant proteins and/or secondary metabolites from plants or parts thereof or plant cells are known in the art, for example: in U.S. Pat. Nos. 9,220,295; 9,289,011; 9,175,052 and US Patent Application Number: 2016/0029663.

[0576] Thus a plant or part thereof or plant cell according to the present invention may be used for molecular farming. A plant or part thereof or plant cell according to the present invention may be used to reduce or eliminate the presence of nicotine and/or other nicotinic alkaloids in the plant or part thereof or plant cell. A plant or part thereof or plant cell according to the present invention may be used to reduce or eliminate the presence of nicotine and/or other nicotinic alkaloids in the product extracted and/or purified from the plant or part thereof or plant cell.

[0577] Advantageously, the use of a low nicotine plant or rootsock in molecular farming will reduce downstream processing costs associated with purification of the product from the plant or part thereof or plant cell. Tobacco plants are attractive bioreactors for the production of recombinant proteins due to their potential for large-scale and low-cost production.

[0578] Plants or parts thereof or plant cells which are suitable for use in molecular farming include but are not limited to Nicotiana spp. Suitably, the plant or plant thereof or plant cell for use in molecular farming may be Nicotiana benthamiana Suitably, the plant or plant thereof or plant cell for use in molecular farming may be Nicotiana tabacum.

[0579] In one aspect, there is provided a tobacco plant for use in molecular farming. For example the tobacco plants according to the present invention may be used for the production of recombinant proteins. Recombinant proteins which may be produced in tobacco plants include for example: antigens for the production of vaccines, antibodies, enzymes, vaccines, growth factors.

[0580] Monoclonal antibodies and fragments thereof may be produced by molecular farming using plants or parts thereof or plant cells according to the present invention, including for example immunoglobulin G (IgG) and immunoglobulin A (IgA), IgA and IgG shimmer molecules, IgG and IgA secreted molecules, single-chain variable fragment, fragment antigen-binding, and variable of heavy and light chains.

[0581] Pharmaceutical proteins may be produced by molecular farming using plants or parts thereof or plant cells according to the present invention, for example, pharmaceutical proteins which have been expressed in plants include erythropoietin, interferon, hirudin, aprotinin, Leu-enkephalin, somatotropin of human growth hormone.

[0582] Non-pharmaceutical proteins may be produced by molecular faming using plants or parts thereof or plant cells according to the present invention, for example non-pharmaceutical proteins derived from plants include avidin, trypsin, aprotinin, β-glucocerebrosidase, peroxidase and cellulose.

[0583] Suitably, the plant or part thereof or plant cell for use in molecular farming according to the present invention may comprise an average alkaloid level or average nicotine level of about 0.01%, 0.02%, 0.05%, 0.0.75%. 0.1%, 0.2%, 0.3%, 0.5%, 0.6%, 0.7%, 0.8%, 0.9%, 1.0%, 1.1%, 1.2%, 1.3%, 1.4%, 1.5%, 1.6%, 1.7%, 1.8%, 1.9%, 2.0%, 2.1%, 2.2%, 2.3%, 2.4%, 2.5%, 2.6%, 2.7%, 2.8%, 2.9%, 3%, 4% or 5% on a dry weight basis. Suitably, the plant or part thereof or plant cell for use in molecular farming according to the present invention may comprise an average alkaloid level or average nicotine level of less than 5%, less, than 4%, less than 3%, less than 2%, less than 1%, less than 0.9%, less than 0.8%, less than 0.7%, less than 0.6%, less than 0.5%, less than 0.4%, less than 0.3%, less than 0.2%, less than 0.1%, less than 0.075%, less than 0.05%, less than 0.02% or less than 0.01%.

[0584] Suitably, molecular farming according to the present invention may produce a product, extract or purified product (e.g. recombinant protein) which comprises an average alkaloid level or average nicotine level of about 0.01%, 0.02%, 0.05%, 0.0.75%. 0.1%, 0.2%, 0.3%, 0.5%, 0.6%, 0.7%, 0.8%, 0.9%, 1.0%, 1.1%, 1.2%, 1.3%, 1.4%, 1.5%, 1.6%, 1.7%, 1.8%, 1.9%, 2.0%, 2.1%, 2.2%, 2.3%, 2.4%, 2.5%, 2.6%, 2.7%, 2.8%, 2.9%, 3%, 4% or 5% on a dry weight basis. Suitably, molecular farming according to the present invention may produce a product, extract or purified product (e.g. recombinant protein) which comprises an average alkaloid level or average nicotine level of less than 5%, less, than 4%, less than 3%, less than 2%, less than 1%, less than 0.9%, less than 0.8%, less than 0.7%, less than 0.6%, less than 0.5%, less than 0.4%, less than 0.3%, less than 0.2%, less than 0.1%, less than 0.075%, less than 0.05%, less than 0.02% or less than 0.01%.

[0585] Polynucleotides/Polypeptides/Constructs

[0586] In certain embodiments of the present invention, constructs which modulate activity or expression of at least one Nic3 gene (or at least one Nic3 gene and at least one Nic1 ERF gene and/or at least one Nic2 ERF gene) may be transformed into plant cells suitably under the direction of a promoter.

[0587] In certain embodiments of the present invention, constructs which decrease (i.e. inhibit) activity or expression of a Nic3 gene (or a Nic3 gene and a Nic1 ERF gene and/or a Nic2 ERF gene) may be transformed into plant cells under the direction of a promoter. The genetic construct may be a gene editing construct or may comprise an RNAi molecule, which may comprise a small interfering RNA (siRNA) molecule, or a short hairpin loop (shRNA) molecule.

[0588] In certain embodiments of the present invention, constructs which increase activity or expression of a Nic3 gene (or a Nic3 gene and a Nic1 ERF gene and/or a Nic2 ERF gene) may be transformed into plant cells under the direction of a promoter e.g. constructs which encodes the equivalent endogenous genes.

[0589] Constructs may be introduced into plants according to the present invention by means of suitable vector, e.g. plant transformation vectors. A plant transformation vector may comprise an expression cassette comprising 5′-3′ in the direction of transcription, a promoter sequence, a construct sequence targeting a Nic3 gene (or targeting a Nic3 gene and a Nic1 ERF gene and/or a Nic2 ERF gene) and, optionally a 3′ untranslated, terminator sequence including a stop signal for RNA polymerase and a polyadenylation signal for polyadenylase. The promoter sequence may be present in one or more copies, and such copies may be identical or variants of a promoter sequence as described above. The terminator sequence may be obtained from plant, bacterial or viral genes. Suitable terminator sequences are the pea rbcS E9 terminator sequence, the nos terminator sequence derived from the nopaline synthase gene of Agrobacterium tumefaciens and the 35S terminator sequence from cauliflower mosaic virus, for example. A person skilled in the art will be readily aware of other suitable terminator sequences.

[0590] The construct of the present invention may also comprise a gene expression enhancing mechanism to increase the strength of the promoter. An example of such an enhancer element is one derived from a portion of the promoter of the pea plastocyanin gene, and which is the subject of International Patent Application No. WO 97/20056, which is incorporated herein by reference. Suitable enhancer elements may be the nos enhancer element derived from the nopaline synthase gene of Agrobacterium tumefaciens and the 35S enhancer element from cauliflower mosaic virus, for example.

[0591] These regulatory regions may be derived from the same gene as the promoter DNA sequence or may be derived from different genes, from Nicotiana tabacum or other organisms, for example from a plant of the family Solanaceae, or from the subfamily Cestroideae. All of the regulatory regions should be capable of operating in cells of the tissue to be transformed.

[0592] The promoter DNA sequence may be derived from the same gene as the gene of interest, e.g. the gene the promoter is going to direct, for instance a gene encoding a Nic3 gene of the invention, a coding sequence used in the present invention or may be derived from a different gene, from Nicotiana tabacum, or another organism, for example from a plant of the family Solanaceae, or from the subfamily Cestroideae.

[0593] The expression cassette may be incorporated into a basic plant transformation vector, such as pBIN 19 Plus, pBI 101, pKYLX71:3552, pCAMBIA2300 or other suitable plant transformation vectors known in the art. In addition to the expression cassette, the plant transformation vector will contain such sequences as are necessary for the transformation process. These may include the Agrobacterium vir genes, one or more T-DNA border sequences, and a selectable marker or other means of identifying transgenic plant cells.

[0594] The term “plant transformation vector” means a construct capable of in vivo or in vitro expression. Preferably, the expression vector is incorporated in the genome of the organism. The term “incorporated” preferably covers stable incorporation into the genome.

[0595] Techniques for transforming plants are well known within the art and include Agrobacterium-mediated transformation, for example. The basic principle in the construction of genetically modified plants is to insert genetic information in the plant genome so as to obtain a stable maintenance of the inserted genetic material. A review of the general techniques may be found in articles by Potrykus (Annu Rev Plant Physiol Plant Mol Biol [1991] 42:205-225) and Christon (AgroFood-Industry Hi-Tech March/April1994 17-27), which are incorporated herein by reference. Typically, in Agrobacterium-mediated transformation a binary vector carrying a foreign DNA of interest, i.e. a Nic3 construct, is transferred from an appropriate Agrobacterium strain to a target plant by the co-cultivation of the Agrobacterium with explants from the target plant. Transformed plant tissue is then regenerated on selection media, which selection media comprises a selectable marker and plant growth hormones. An alternative is the floral dip method (Clough & Bent, 1998 Plant J. 1998 December; 16(6):735-43, which is incorporated herein by reference) whereby floral buds of an intact plant are brought into contact with a suspension of the Agrobacterium strain containing the chimeric gene, and following seed set, transformed individuals are germinated and identified by growth on selective media. Direct infection of plant tissues by Agrobacterium is a simple technique which has been widely employed and which is described in Butcher D. N. et al., (1980), Tissue Culture Methods for Plant Pathologists, eds.: D. S. Ingrams and J. P. Helgeson, 203-208 which is incorporated herein by reference.

[0596] Further suitable transformation methods include direct gene transfer into protoplasts using polyethylene glycol or electroporation techniques, particle bombardment, micro-injection and the use of silicon carbide fibres for example. Transforming plants using ballistic transformation, including the silicon carbide whisker technique are taught in Frame B R, Drayton P R, Bagnaall S V, Lewnau C J, Bullock W P, Wilson H M, Dunwell J M, Thompson J A & Wang K (1994) which is incorporated herein by reference. Production of fertile transgenic maize plants by silicon carbide whisker-mediated transformation is taught in The Plant Journal 6: 941-948, which is incorporated herein by reference) and viral transformation techniques is taught in for example Meyer P, Heidmann I & Niedenhof I (1992), which is incorporated herein by reference. The use of cassava mosaic virus as a vector system for plants is taught in Gene 110: 213-217, which is incorporated herein by reference. Further teachings on plant transformation may be found in EP-A-0449375, incorporated herein by reference.

[0597] In a further aspect, the present invention relates to a vector system which carries a construct and introducing it into the genome of an organism, such as a plant, suitably a tobacco plant. The vector system may comprise one vector, but it may comprise two vectors. In the case of two vectors, the vector system is normally referred to as a binary vector system. Binary vector systems are described in further detail in Gynheung Anetal, (1980), Binary Vectors, Plant Molecular Biology Manual A3, 1-19, which is incorporated herein by reference.

[0598] One extensively employed system for transformation of plant cells uses the Ti plasmid from Agrobacterium tumefaciens or a Ri plasmid from Agrobacterium rhizogenes described by An et al., (1986), Plant Physiol. 81, 301-305 and Butcher D. N. et al., (1980), Tissue Culture Methods for Plant Pathologists, eds.: D. S. Ingrams and J. P. Helgeson, 203-208 which are incorporated herein by reference. After each introduction method of the desired exogenous gene according to the present invention in the plants, the presence and/or insertion of further DNA sequences may be necessary. The use of T-DNA for the transformation of plant cells has been intensively studied and is described in EP-A-120516; Hoekema, in: The Binary Plant Vector System Offset-drukkerij Kanters B. B., Amsterdam, 1985, Chapter V; Fraley, et al., Crit. Rev. Plant Sci., 4:1-46; and Anetal., EMBO J (1985) 4:277-284, incorporated herein by reference.

[0599] Plant cells transformed with construct(s) which modulate the activity or expression of a Nic3 gene (or a Nic3 gene and a Nic1 ERF gene and/or a Nic2 ERF gene) may be grown and maintained in accordance with well-known tissue culturing methods such as by culturing the cells in a suitable culture medium supplied with the necessary growth factors such as amino acids, plant hormones, vitamins, etc.

[0600] The term “transgenic plant” in relation to the present invention includes any plant that comprises a construct which modulates the activity or expression of a Nic3 gene (or of a Nic3 gene and a Nic1 ERF gene and/or a Nic2 ERF gene in combination) according to the invention. Accordingly a transgenic plant is a plant which has been transformed with a construct according to the invention. Preferably the transgenic plant exhibits modulated Nic3 gene activity or expression (or of a Nic3 gene and a Nic1 ERF gene and/or a Nic2 ERF gene activity or expression) and modulated alkaloid content, according to the present invention. The term “transgenic plant” does not cover native nucleotide coding sequences in their natural environment when they are under the control of their native promoter which is also in its natural environment.

[0601] In one aspect, a Nic3 gene, a Nic1 ERF gene, a Nic2 ERF gene, a construct, plant transformation vector or plant cell according to the present invention is in an isolated form. The term “isolated” means that the sequence is at least substantially free from at least one other component with which the sequence is naturally associated in nature and as found in nature.

[0602] In one aspect, a Nic3 gene, a Nic1 ERF gene, a Nic2 ERF gene, a construct, plant transformation vector or plant cell according to the invention is in a purified form. The term “purified” means in a relatively pure state, e.g. at least about 90% pure, or at least about 95% pure or at least about 98% pure.

[0603] The term “nucleotide sequence” as used herein refers to an oligonucleotide sequence or polynucleotide sequence, and variant, homologues, fragments and derivatives thereof (such as portions thereof). The nucleotide sequence may be of genomic or synthetic or recombinant origin, which may be double-stranded or single-stranded whether representing the sense or anti-sense strand.

[0604] The term “nucleotide sequence” in relation to the present invention includes genomic DNA, cDNA, synthetic DNA, and RNA. Preferably it means DNA, more preferably cDNA sequence coding for the present invention.

[0605] In a preferred embodiment, the nucleotide sequence when relating to and when encompassed by the per se scope of the present invention, i.e. the Nic3 gene, Nic1 ERF gene or Nic2 ERF gene, includes the native nucleotide sequence when in its natural environment and when it is linked to its naturally associated sequence(s) that is/are also in its/their natural environment. For ease of reference, we shall call this preferred embodiment the “native nucleotide sequence”. In this regard, the term “native nucleotide sequence” means an entire nucleotide sequence that is in its native environment and when operatively linked to an entire promoter with which it is naturally associated, which promoter is also in its native environment.

[0606] A nucleotide sequence encoding either a protein which has the specific properties as a Nic3 gene, Nic1 ERF or a Nic2 ERF as defined herein or a protein which is suitable for modification may be identified and/or isolated and/or purified from any cell or organism producing said protein. Various methods are well known within the art for the identification and/or isolation and/or purification of nucleotide sequences. By way of example, PCR amplification techniques to prepare more of a sequence may be used once a suitable sequence has been identified and/or isolated and/or purified.

[0607] In a yet further alternative, the nucleotide sequence encoding the Nic3 gene or the Nic1 ERF or Nic2 ERF may be prepared synthetically by established standard methods, e.g. the phosphoroamidite method described by Beucage S. L. et al., (1981) Tetrahedron Letters 22, p 1859-1869 which is incorporated herein by reference, or the method described by Matthes et al., (1984) EMBO J. 3, p 801-805 which is incorporated herein by reference. In the phosphoroamidite method, oligonucleotides are synthesised, e.g. in an automatic DNA synthesiser, purified, annealed, ligated and cloned in appropriate vectors.

[0608] As used herein, the term “amino acid sequence” is synonymous with the term “polypeptide” and/or the term “protein”. In some instances, the term “amino acid sequence” is synonymous with the term “peptide”. In some instances, the term “amino acid sequence” is synonymous with the term “enzyme”.

[0609] The present invention also encompasses the use of sequences having a degree of sequence identity or sequence homology with amino acid sequence(s) of a polypeptide having the specific properties defined herein or of any nucleotide sequence i.e. Nic3 gene, Nic1 ERF gene, Nic2 ERF gene encoding such a polypeptide (hereinafter referred to as a “homologous sequence(s)”). Here, the term “homologue” means an entity having a certain homology with the subject amino acid sequences and the subject nucleotide sequences. Here, the term “homology” can be equated with “identity”.

[0610] The homologous amino acid sequence and/or nucleotide sequence and/or fragments should provide and/or encode a polypeptide which retains the functional activity and/or enhances the activity of the Nic3 or Nic1 ERF or Nic2 ERF gene. Typically, the homologous sequences will comprise the same active sites etc. as the subject amino acid sequence for instance or will encode the same active sites. Although homology can also be considered in terms of similarity (i.e. amino acid residues having similar chemical properties/functions), in the context of the present invention it is preferred to express homology in terms of sequence identity. Homologous sequences typically retain functional domains or motifs.

[0611] In one embodiment, a homologous sequence is taken to include an amino acid sequence or nucleotide sequence which has one, two or several additions, deletions and/or substitutions compared with the subject sequence.

[0612] Homology or identity comparisons can be conducted by eye, or more usually, with the aid of readily available sequence comparison programs. These commercially available computer programs can calculate % homology between two or more sequences. % homology or % identity may be calculated over contiguous sequences, i.e. one sequence is aligned with the other sequence and each amino acid in one sequence is directly compared with the corresponding amino acid in the other sequence, one residue at a time. This is called an “ungapped” alignment. Typically, such ungapped alignments are performed only over a relatively short number of residues.

[0613] Although this is a very simple and consistent method, it fails to take into consideration that, for example, in an otherwise identical pair of sequences, one insertion or deletion will cause the following amino acid residues to be put out of alignment, thus potentially resulting in a large reduction in % homology when a global alignment is performed. Consequently, most sequence comparison methods are designed to produce optimal alignments that take into consideration possible insertions and deletions without penalising unduly the overall homology score. This is achieved by inserting “gaps” in the sequence alignment to try to maximise local homology.

[0614] However, these more complex methods assign “gap penalties” to each gap that occurs in the alignment so that, for the same number of identical amino acids, a sequence alignment with as few gaps as possible—reflecting higher relatedness between the two compared sequences—will achieve a higher score than one with many gaps. “Affine gap costs” are typically used that charge a relatively high cost for the existence of a gap and a smaller penalty for each subsequent residue in the gap. This is the most commonly used gap scoring system. High gap penalties will of course produce optimised alignments with fewer gaps. Most alignment programs allow the gap penalties to be modified. However, it is preferred to use the default values when using such software for sequence comparisons.

[0615] Calculation of maximum % homology therefore firstly requires the production of an optimal alignment, taking into consideration gap penalties. A suitable computer program for carrying out such an alignment is the Vector NTI (Invitrogen Corp.). Examples of software that can perform sequence comparisons include, but are not limited to, the BLAST package (see Ausubel et al. 1999 Short Protocols in Molecular Biology, 4th Ed—Chapter 18), BLAST 2 (see FEMS Microbiol Lett 1999 174(2): 247-50; FEMS Microbiol Lett 1999 177(1): 187-8 and tatiana@ncbi.nlm.nih.qov), FASTA (Altschul et al. 1990 J. Mol. Biol. 403-410) and AlignX for example. At least BLAST, BLAST 2 and FASTA are available for offline and online searching (see Ausubel et al. 1999, pages 7-58 to 7-60).

[0616] Although the final % homology can be measured in terms of identity, the alignment process itself is typically not based on an all-or-nothing pair comparison. Instead, a scaled similarity score matrix is generally used that assigns scores to each pairwise comparison based on chemical similarity or evolutionary distance. An example of such a matrix commonly used is the BLOSUM62 matrix—the default matrix for the BLAST suite of programs. Vector NTI programs generally use either the public default values or a custom symbol comparison table if supplied (see user manual for further details). For some applications, it is preferred to use the default values for the Vector NTI package.

[0617] Alternatively, percentage homologies may be calculated using the multiple alignment feature in Vector NTI (Invitrogen Corp.), based on an algorithm, analogous to CLUSTAL (Higgins D G & Sharp P M (1988), Gene 73(1), 237-244). Once the software has produced an optimal alignment, it is possible to calculate % homology, preferably % sequence identity. The software typically does this as part of the sequence comparison and generates a numerical result.

[0618] Should gap penalties be used when determining sequence identity, then preferably the following parameters are used for pairwise alignment:

| FOR BLAST | | | |
|---|---|---|---|
| GAP OPEN | 0 | | |
| GAP EXTENSION | 0 | | |
| FOR CLUSTAL | DNA | PROTEIN | |
| WORD SIZE | 2 | 1 | K triple |
| GAP PENALTY | 15 | 10 | |
| GAP EXTENSION | 6.66 | 0.1 | |

[0619] In one embodiment, CLUSTAL may be used with the gap penalty and gap extension set as defined above. In some embodiments the gap penalties used for BLAST or CLUSTAL alignment may be different to those detailed above. The skilled person will appreciate that the standard parameters for performing BLAST and CLUSTAL alignments may change periodically and will be able to select appropriate parameters based on the standard parameters detailed for BLAST or CLUSTAL alignment algorithms at the time.

[0620] Suitably, the degree of identity with regard to a nucleotide sequence may be determined over at least 50 contiguous nucleotides, preferably over at least 60 contiguous nucleotides, preferably over at least 70 contiguous nucleotides, preferably over at least 80 contiguous nucleotides, preferably over at least 90 contiguous nucleotides, preferably over at least 100 contiguous nucleotides, preferably over at least 150 contiguous nucleotides, preferably over at least 200 contiguous nucleotides, preferably over at least 250 contiguous nucleotides, preferably over at least 300 contiguous nucleotides, preferably over at least 350 contiguous nucleotides, preferably over at least 400 contiguous nucleotides, preferably over at least 450 contiguous nucleotides, preferably over at least 500 contiguous nucleotides, preferably over at least 550 contiguous nucleotides, preferably over at least 600 contiguous nucleotides, preferably over at least 650 contiguous nucleotides, or preferably over at least 700 contiguous nucleotides.

[0621] Suitably, the degree of identity with regard to a nucleotide, cDNA, cds or amino acid sequence may be determined over the whole sequence.

[0622] The sequences may also have deletions, insertions or substitutions of amino acid residues which produce a silent change and result in a functionally equivalent substance. Deliberate amino acid substitutions may be made on the basis of similarity in polarity, charge, solubility, hydrophobicity, hydrophilicity, and/or the amphipathic nature of the residues as long as the secondary binding activity of the substance is retained. For example, negatively charged amino acids include aspartic acid and glutamic acid; positively charged amino acids include lysine and arginine; and amino acids with uncharged polar head groups having similar hydrophilicity values include leucine, isoleucine, valine, glycine, alanine, asparagine, glutamine, serine, threonine, phenylalanine, and tyrosine.

[0623] Conservative substitutions may be made, for example according to Table 4 below. Amino acids in the same block in the second column and preferably in the same line in the third column may be substituted for each other:

TABLE 4
Examples of conservative substitutions

| | | |
|---|---|---|
| ALIPHATIC | Non-polar | G A P |
| | | I L V |
| | Polar - uncharged | C S T M |
| | | N Q |
| | Polar - charged | D E |
| | | K R |
| AROMATIC | | H F W Y |

[0624] The present invention also encompasses homologous substitution (substitution and replacement are both used herein to mean the interchange of an existing amino acid residue, with an alternative residue) that may occur i.e. like-for-like substitution such as basic for basic, acidic for acidic, polar for polar etc. Non-homologous substitution may also occur i.e. from one class of residue to another or alternatively involving the inclusion of unnatural amino acids such as ornithine (hereinafter referred to as Z), diaminobutyric acid ornithine (hereinafter referred to as B), norleucine ornithine (hereinafter referred to as O), pyriylalanine, thienylalanine, naphthylalanine and phenylglycine.

[0625] Replacements may also be made by unnatural amino acids include; alpha* and alpha-disubstituted* amino acids, N-alkyl amino acids*, lactic acid*, halide derivatives of natural amino acids such as trifluorotyrosine*, p-Cl-phenylalanine*, p-Br-phenylalanine*, p-I-phenylalanine*, L-allyl-glycine*, ß-alanine*, L-α-amino butyric acid*, L-γ-amino butyric acid*, L-α-amino isobutyric acid*, L-ε-amino caproic acid^{#}, 7-amino heptanoic acid*, L-methionine sulfone^{#}*, L-norleucine*, L-norvaline*, p-nitro-L-phenylalanine*, L-hydroxyproline^{#}, L-thioproline*, methyl derivatives of phenylalanine (Phe) such as 4-methyl-Phe*, pentamethyl-Phe*, L-Phe (4-amino)^{#}, L-Tyr (methyl)*, L-Phe (4-isopropyl)*, L-Tic (1,2,3,4-tetrahydroisoquinoline-3-carboxyl acid)*, L-diaminopropionic acid # and L-Phe (4-benzyl)*. The notation * has been utilised for the purpose of the discussion above (relating to homologous or non-homologous substitution), to indicate the hydrophobic nature of the derivative whereas # has been utilised to indicate the hydrophilic nature of the derivative, #* indicates amphipathic characteristics.

[0626] Variant amino acid sequences may include suitable spacer groups that may be inserted between any two amino acid residues of the sequence including alkyl groups such as methyl, ethyl or propyl groups in addition to amino acid spacers such as glycine or β-alanine residues. A further form of variation, involves the presence of one or more amino acid residues in peptoid form, which will be well understood by those skilled in the art. For the avoidance of doubt, “the peptoid form” is used to refer to variant amino acid residues wherein the α-carbon substituent group is on the residue's nitrogen atom rather than the α-carbon. Processes for preparing peptides in the peptoid form are known in the art, for example Simon R J et al., PNAS (1992) 89(20), 9367-9371 and Horwell D C, Trends Biotechnol. (1995) 13(4), 132-134.

[0627] The nucleotide sequences for use in the present invention may include within them synthetic or modified nucleotides. A number of different types of modification to oligonucleotides are known in the art. These include methylphosphonate and phosphorothioate backbones and/or the addition of acridine or polylysine chains at the 3′ and/or 5′ ends of the molecule. For the purposes of the present invention, it is to be understood that the nucleotide sequences described herein may be modified by any method available in the art. Such modifications may be carried out in order to enhance the in vivo activity or life span of nucleotide sequences of the present invention. The present invention also encompasses sequences that are complementary to the nucleic acid sequences of the present invention or sequences that are capable of hybridising either to the sequences of the present invention or to sequences that are complementary thereto. The term “hybridisation” as used herein shall include “the process by which a strand of nucleic acid joins with a complementary strand through base pairing” as well as the process of amplification as carried out in polymerase chain reaction (PCR) technologies.

[0628] The present invention also relates to nucleotide sequences that can hybridise to the nucleotide sequences of the present invention (including complementary sequences of those presented herein). Preferably, hybridisation is determined under stringency conditions (e.g. 50° C. and 0.2×SSC {1×SSC=0.15 M NaCl, 0.015 M Na₃citrate pH 7.0}). More preferably, hybridisation is determined under high stringency conditions (e.g. 65° C. and 0.1×SSC {1×SSC=0.15 M NaCl, 0.015 M Na₃citrate pH 7.0}).

[0629] In one aspect the sequence for use in the present invention is a synthetic sequence—i.e. a sequence that has been prepared by in vitro chemical or enzymatic synthesis. It includes, but is not limited to, sequences made with optimal codon usage for host organisms.

[0630] The term “expression vector” means a construct capable of in vivo or in vitro expression. In one embodiment the vector of the present invention expresses a Nic3 gene as described herein. In one embodiment the vector of the present invention further expresses a Nic1 ERF and/or aNic2 ERF gene as described herein. Preferably, the expression vector is incorporated into the genome of a suitable host organism. The term “incorporated” preferably covers stable incorporation into the genome.

[0631] The nucleotide sequence for use in the present invention may be present in a vector in which the nucleotide sequence is operably linked to regulatory sequences capable of providing for the expression of the nucleotide sequence by a suitable host organism. The constructs for use in the present invention may be transformed into a suitable host cell as described herein to provide for expression of a polypeptide of the present invention. The choice of vector e.g. a plasmid, cosmid, or phage vector will often depend on the host cell into which it is to be introduced. Vectors may be used in vitro, for example for the production of RNA or used to transfect, transform, transduce or infect a host cell.

[0632] In some applications, the nucleotide sequence for use in the present invention is operably linked to a regulatory sequence which is capable of providing for the expression of the nucleotide sequence, such as by the chosen host cell. By way of example, the present invention covers a vector comprising the nucleotide sequence of a Nic3 gene as described herein operably linked to such a regulatory sequence, i.e. the vector is an expression vector. Suitably the vector may additionally comprise the nucleotide sequence of a Nic1 ERF gene and/or a Nic2 ERF gene as described herein is operably linked to a regulatory sequence.

[0633] The term “operably linked” refers to a juxtaposition wherein the components described are in a relationship permitting them to function in their intended manner. A regulatory sequence “operably linked” to a coding sequence is ligated in such a way that expression of the coding sequence is achieved under conditions compatible with the control sequences.

[0634] The term “regulatory sequences” includes promoters and enhancers and other expression regulation signals. The term “promoter” is used in the normal sense of the art, e.g. an RNA polymerase binding site. The nucleotide sequence within a construct which encodes a Nic3 gene or a Nic3 gene in combination with a Nic1 ERF gene and/or a Nic2 ERF gene may be operably linked to at least a promoter.

[0635] The term “construct”—which is synonymous with terms such as “cassette” or “vector”—includes a nucleotide sequence for use according to the present invention directly or indirectly attached to a promoter.

[0636] An example of an indirect attachment is the provision of a suitable spacer group such as an intron sequence, such as the Sh1-intron or the ADH intron, intermediate the promoter and the nucleotide sequence of the present invention. The same is true for the term “fused” in relation to the present invention which includes direct or indirect attachment. In some cases, the terms do not cover the natural combination of the nucleotide sequence coding for the protein ordinarily associated with the wild type gene promoter and when they are both in their natural environment. The construct may even contain or express a marker, which allows for the selection of the genetic construct.

[0637] A review of the general techniques used for transforming plants may be found in articles by Potrykus (Annu Rev Plant Physiol Plant Mol Biol [1991] 42:205-225) and Christou (Agro-Food-Industry Hi-Tech March/April 1994 17-27), which are incorporated herein by reference. Further teachings on plant transformation may be found in EP-A-0449375, incorporated herein by reference.

[0638] In one embodiment provided herein are SNPs for use in genotyping plants (e.g. tobacco plants) having a low alkaloid (e.g. low nicotine) trait. Suitably, SNPs may be selected from tables 5-9 below. Suitably at least two SNPs may be selected, a first SNP may be selected from any of Tables 5 to 7 and a second SNP may be selected from any of Tables 5 to 7. Suitably at least two SNPs may be selected, a first SNP may be selected from Table 5 and a second SNP may be selected from Table 5. Suitably at least two SNPs may be selected, a first SNP may be selected from Table 6 and a second SNP may be selected from Table 6. Suitably at least two SNPs may be selected, a first SNP may be selected from Table 7 and a second SNP may be selected from Table 7.

[0639] In one embodiment provided herein are markers for use in genotyping plants (e.g. tobacco plants) having a low alkaloid (e.g. low nicotine trait).

[0640] In one embodiment provided herein are SNPs for use in genotyping the Nic3 locus in plants (e.g. tobacco plants). Suitably, SNPs may be selected from tables 5-7 below.

[0641] In one embodiment provided herein are markers for use in genotyping the Nic3 locus in plants (e.g. tobacco plants).

TABLE 5
SNPs associated with the QTL identified in the Examples.

| | | SEQ | | |
|---|---|---|---|---|
| Landmark\|pos | Flanking_seq | ID No. | Variant | iupac |
| Nitab4.5_0000 | TACCAAAAAGAATTACATTTGATGTAAAGAGGATTACACTGA | 313 | [T/A] | W |
| 535\|228474 | ACAACTAC[T/A]TATTTTCGTTTATTAGAAAATGGACTTTCAT | | | |
| | TCATTATCATTAGTACACA | | | |
| Nitab4.5_0000 | TTGTAGAGAGGGGATTTTTCTGATAAGCATATGCTATATTCT | 314 | [C/A] | M |
| 535\|242933 | ACCAAAAG[C/A]TCAATAATACTTTACTTTTCCTGCTTATTTG | | | |
| | CATTGTTCTTACTGACTCT | | | |
| Nitab4.5_0000 | GTGAGACAGTTGTGTAATTGAATTGATCCATGCATCTAATAC | 315 | [C/T] | Y |
| 535\|243206 | TGACTTGT[C/T]TGATTCTTTGTTCTTATCAAAATCATTAAAA | | | |
| | ATGGTAGATAATGGTGTTA | | | |
| Nitab4.5_0000 | TTCCATCAGCGATACCCGCAATAAGGGGAGCGAGGCCACGC | 316 | [G/A] | R |
| 535\|243346 | TGGTCCACG[G/A]CAGCCGATATCCGCGACATGTTTGGGAG | | | |
| | GCGACTCCTGATTATGCTGAAG | | | |
| Nitab4.5_0000 | CAACAACTTGGGCGGATGTTCACAACTGGTACAAATCTAAG | 317 | [G/A] | R |
| 535\|244324 | ATAAAAATT[G/A]AAGATGATCAGCTCGGTTTCCCAGCGTCA | | | |
| | TCCGAGGGTCGGGTCCGGGAG | | | |
| Nitab4.5_0000 | AGAATCTTATCAGGTATGGAGATATTTTCAGGTACCAAAAGA | 318 | [G/A] | R |
| 535\|245534 | AAACGGAC[G/A]CAACAAAGTCCACAGGGAAGAACTTGAAC | | | |
| | AAGTCGCATAGTTTGAAAAGT | | | |
| Nitab4.5_0000 | TTCATGCGACGTCATGGTACGTAGGCAATCTACATAGAGTTC | 319 | [C/T] | Y |
| 535\|250082 | GATCGAAT[C/T]ATTTTTTTATTTATTAAAAGAAAAAAAGGA | | | |
| | AAAAAGAAAAACAGATAAAA | | | |
| Nitab4.5_0000 | TTTCATTTTGATGTAATAACAGGATCGCAAACCGGAACCTCG | 320 | [G/A] | R |
| 535\|255470 | ACGGAACA[G/AJCACCTCAATCGGCTCTCCACCTCGGTAAAC | | | |
| | TCCGTCACTCTTCCTACTTC | | | |
| Nitab4.5_0000 | TCCAGCCTTGTTTCCGGTTTCCTTGCTGAGTTCTGCTCGAGTT | 321 | [C/T] | Y |
| 535\|256906 | TCAAGTT[C/T]GAGGTGTTGTCCGAGTTTAAGGTCATGAACA | | | |
| | GTGATTAAAGTGTGGGTTT | | | |
| Nitab4.5_0000 | GCAACAGAACAACGACGAGCTTGCCAGAAAATGAGCTGAAA | 322 | [G/A] | R |
| 535\|263907 | AGACCACCA[G/A]CGGCTCCTTATCCACCTCGTCGACCAACG | | | |
| | ACCTTTCAGCCTGTTCTTTTT | | | |
| Nitab4.5_0000 | CTAGATACACACAGCCGCACACTTGTCTTCTTCGGTACTCCCT | 323 | [G/A] | R |
| 535\|264016 | CAACAAC[G/A]TCACACGCACACATACGAACAGAGGCGGAA | | | |
| | AGGGAAGGTTTAAAAAATCA | | | |
| Nitab4.5_0000 | CTGAGTTCTGCTCGAGTTTCAAGTTCGAGGTGTTGTCCGAGT | 324 | [T/A] | W |
| 535\|264309 | TTAAGGTC[T/A]TGAACAGTGATTAAAGTGTGGGTTTGAATC | | | |
| | CGTGTTTGGTTGAGTTTCCG | | | |
| Nitab4.5_0000 | ATCACATCATCACCCTATCATCCGAGCATAAACGGCCAAGCA | 325 | [G/A] | R |
| 535\|268652 | GAATCAAC[G/A]AACAAGGTGATTATACAAAATCTCAAAAA | | | |
| | GAGATTGGAAGAAGCTAAAGG | | | |
| Nitab4.5_0000 | ATCTCTTATAAAAATCCTCACGTTAAAGGGTTGATTTCGGAA | 326 | [G/A] | R |
| 535\|270041 | GAACTTAT[G/A]CCTGGAATCCAAATGTTCTTAGAGGGAAAT | | | |
| | ACACCCGAAATCTTGCATAA | | | |
| Nitab4.5_0000 | AGGAAGAGAAGCATCTACGCCCCTAGAAGAAATGGGTGGA | 327 | [A/G] | R |
| 535\|270356 | TCCTCCCCCG[A/G]TTCGATATTTTGGCCTTCGTCATTTTAGT | | | |
| | CTTCAGCATCATCGCCTTCCG | | | |
| Nitab4.5_0000 | CCGATTTCTCTTCGGTTCCTGAGAAATCACAACCGGAACCAG | 328 | [G/A] | R |
| 535\|270454 | AAGAATTG[G/A]TAGCATCAGGTCGAGCCGAAAGACCCCTT | | | |
| | TTTGCAGCTAACTCCAACTCA | | | |
| Nitab4.5_0000 | CGAGCCGAAAGACCCCTTTTTGCAGCTAACTCCAACTCACGG | 329 | [G/T] | K |
| 535\|270516 | GCCTTAGA[G/T]ATTTCGGCATCAAATCAATAATACCTGCTTT | | | |
| | GGCCTATTCTAAGGTTTTT | | | |
| Nitab4.5_0000 | GGGGAAGAGGTACGTCGACCTTTCGGGAAACTGCGATCGGT | 330 | [G/A] | R |
| 535\|271398 | AGAGATGAT[G/A]CAGTAATTACTGGTGGCAGAAACAGAGT | | | |
| | TGGTGAAGAAGGAGATGAAGTT | | | |
| Nitab4.5_0000 | GCTAGTCCTTTCCACGTGCGGGTTCTGGGTGTAGACATGTGA | 331 | [C/A] | M |
| 535\|272053 | TTTTTGAC[C/A]CTCCCCAAGATTTTTCATAAGCATGTAAATA | | | |
| | TTTAATTTAGGCCTAATAT | | | |
| Nitab4.5_0000 | ACCAGATGAGCCTCCCCAATGCCACTTCTCTCCACAGAACTC | 332 | [G/A] | R |
| 535\|279401 | CCAAAGTC[G/A]TACATCACTCTTGCAGTACCCAGCTCCACA | | | |
| | AAATGCCTATCTACCCCCAC | | | |
| Nitab4.5_0000 | GTAACACTCTAGTCCAAGCAGGAAAAATAATGAAAATGAGA | 333 | [C/T] | Y |
| 535\|281378 | GAGTCTTAT[C/T]GGTGAAAACCCTTACAGGCACCGTAAGGC | | | |
| | GAAGGGAGCTGAGAGAAATCA | | | |
| Nitab4.5_0000 | ACTTTATAGTTTTCTCGTTAGGAATCATCTTTTTCCATTGTCCT | 334 | [C/A] | M |
| 535\|281825 | TCACTC[C/A]TTTCCTTTTTGTCTTGTTTACTTCCTTTTCCTAAG | | | |
| | TCTGTGCAGTTAGAA | | | |
| Nitab4.5_0000 | GCTAACACATAAAATGTCATAAGTCAGAAAAGAACAACAGG | 335 | [C/T] | Y |
| 535\|281986 | TGCATTGAG[C/T]TGGTAATAATCAACATGCTTTGGGATCCT | | | |
| | GTGAAAATCAAAGGTTGGTAC | | | |
| Nitab4.5_0000 | AAGTTATCATGGCAAGTGAAGGAGCAATAGACCTCAAGGCC | 336 | [G/A] | R |
| 535\|282301 | AATGCTAGT[G/A]GGTTAAGTCAGGAAATAACAACATGCAC | | | |
| | ATTGAGTGGATGGTAATTGACG | | | |
| Nitab4.5_0000 | TGGATAATGGGATTTAGTTTTTAAATTTTCAGGACTCTTCTAG | 337 | [G/A] | R |
| 535\|283098 | ATAATGG[G/A]ATTTAATTTTAAAAAAGTTTTCAAGCTTCTG | | | |
| | GTTAATGGGATTTAGTTTT | | | |
| Nitab4.5_0000 | GTTAAAATCGAACCACAGTCTAAAATATGTACTAAAATCAGA | 338 | [C/T] | Y |
| 535\|286896 | TAATAAGC[C/T]GAATATAGYAGTTGAGCGACCGTGCTAGAA | | | |
| | CCACGGAACTCGGGAATGCC | | | |
| Nitab4.5_0000 | GAACCACAGTCTAAAATATGTACTAAAATCAGATAATAAGCY | 339 | [T/C] | Y |
| 535\|286905 | GAATATAG[T/C]AGTTGAGCGACCGTGCTAGAACCACGGAA | | | |
| | CTCGGGAATGCCTAACACCTT | | | |
| Nitab4.5_0000 | GGGTAAGGTTATCCGCTCTGCCAGATCAGGAGCCATAATAT | 340 | [G/T] | K |
| 535\|287784 | CTAAATCTT[G/T]GCAATGACAGTCTTTTCCACAACAGGAAT | | | |
| | ACTAGAAGGACAGATGGAAGA | | | |
| Nitab4.5_0000 | TACAACGATAACCGGCAAAAGTGATGCTAAATCAAGGGATG | 341 | [T/C] | Y |
| 535\|288224 | ACGCGTGTT[T/C]AGCCCCAACCCACTCATGGCTGCATCTGC | | | |
| | GATAGACAACTCGCTTCTGCG | | | |
| Nitab4.5_0000 | AAGAAATTTCAGATTTTTCCTAAGTCCATATTTTTATCCGTTA | 342 | [G/A] | R |
| 535\|288360 | ACCATCC[G/A]AACTTCGCCGGAGGCCCTCGGTACCTCAACC | | | |
| | AAACATACCAAAAATCCAA | | | |
| Nitab4.5_0000 | TTATCATTATATTGTGGTTTATTGTTAATTGTCTTACCTAACG | 343 | [C/A] | M |
| 535\|289102 | GATTGGG[C/A]TATGTGCCATCACGACTAGTTGAATTTTGGG | | | |
| | TCGTAACAAGTTGGTATCA | | | |
| Nitab4.5_0000 | TGCAAGATGTGTTCAGATGGTTTGAATGTAACTGGAAGAGT | 344 | [A/G] | R |
| 535\|289649 | TTGCTTGAG[A/G]TGTGAAAAATGACTATTGGATGCTCGATT | | | |
| | TATGTGGATGTGTCATATAGT | | | |
| Nitab4.5_0000 | GGATGCAATCTTTAACCATTAATTTTTAGGTTTCAAGTTCGAG | 345 | [A/G] | R |
| 535\|290239 | ACATAAG[A/G]ATTGAGAAAATCCTTTACAATGAGATTTTCT | | | |
| | CTTTAGCAAGCCTCGAGGT | | | |
| Nitab4.5_0000 | TAGCTTCGTATTATATTTTTTTCCCATGGAGCTAGAAATAATT | 346 | [G/A] | R |
| 535\|295882 | AAATAAG[G/A]TATATATATTTTTGATCATTTGGATATAACCA | | | |
| | TGATACCTCGTTACTTCC | | | |
| Nitab4.5_0000 | AGTGCATAAAAGTGACAACAAAGACAACAAACCCATTGAAT | 347 | [G/A] | R |
| 535\|296545 | TCCACAAAT[G/A]GGGTCTGGAGAGGATAGTGTATACGCAG | | | |
| | ACCTTACCCTTACCTTATGAAG | | | |
| Nitab4.5_0000 | ATTAATACGAGTATCATGGTAAATTATGTACGTTATTTATTAT | 348 | [G/T] | K |
| 535\|299417 | TTCTTAA[G/T]GGACGTAAAAAGTCAAAACGTGACATGTAAA | | | |
| | AATGAACGGAGGGAGTACT | | | |
| Nitab4.5_0000 | CACTTCATCCACCCCACCCCTATACGGTGTGGCTTCCTCGTCG | 349 | [C/T] | Y |
| 535\|300790 | ATCTCCC[C/T]GATCCCCTGAATAACCGACCCAAGGTACTTG | | | |
| | AAACTACCCCTCTTGGGAA | | | |
| Nitab4.5_0000 | GCGGACCCATAATTTTTAGGCGATGGGGCACATTATTCTGCT | 350 | [G/C] | S |
| 535\|301472 | CAACCAAT[G/C]CCCCCTAAAGGCTTTTAGTGTTCAGGGTGC | | | |
| | CAACTGCTTTAAATTAATTA | | | |
| Nitab4.5_0000 | AGATTGTACATCCTCCTTATTTTTGGTAATCTTGTCACCTTCAC | 351 | [C/T] | Y |
| 535\|311720 | CCTCCC[C/T]CTTCTCTTGAGAAACCTTTTTCTTTTCTAGAGCC | | | |
| | CTACAATTGACTATGT | | | |
| Nitab4.5_0000 | GCCCCGCCAGCCACGCCGCCAATCTGCCGGAAAACACAGTT | 352 | [C/T] | Y |
| 535\|312924 | CCCATCCAT[C/T]GAGCAGCCCATCTTCTTCTTCAGCTGAACG | | | |
| | ACCAAACGACCCCTGACCTC | | | |
| Nitab4.5_0000 | GTGCGTAGTTGCTTTAGGCGTGCTATTTTAAAATTACCTTCCT | 353 | [G/A] | R |
| 535\|314236 | AAACTCG[G/A]GTGTGCATTTATGTGACCAAATCCAAGTCTC | | | |
| | AACAACGTTAGATAAAATG | | | |
| Nitab4.5_0000 | CCGATCTTCTAGAACTACGCAAAGATCTGATTCATGCGAGGT | 354 | [G/A] | R |
| 535\|316783 | CATGATAC[G/A]TAGGCAACCTACATAGGGTTCGATCGAATC | | | |
| | ATTTTTTTATCACTAAAAGA | | | |
| Nitab4.5_0000 | AAAAAGGGACAAGAGGATCAAAGGCCATTGTTTGTTGCTAT | 355 | [G/A] | R |
| 535\|329120 | TGTGGTGCC[G/A]TTTAACATCAACATGGATCTGGCACGGTT | | | |
| | TTGGCGTTTTTTTTTTGTCAC | | | |
| Nitab4.5_0000 | TGTCACTTTAAGTTGGAAAAAACTCCCTTATATACTCCCTTCT | 356 | [G/A] | R |
| 535\|329994 | CGGGGGT[G/A]TAAGAAATAGGAGGTGTGACAAGTGTATCC | | | |
| | ATGTTGAATGCACCAGTTGA | | | |
| Nitab4.5_0000 | GCAATTAGGGAAAGAATTGTTGATGGCTATCTATAGAGTCC | 357 | [G/A] | R |
| 535\|330357 | AACTGATTA[G/A]CTGCTCCATTTTGAAAAGCTTAAATCTCTT | | | |
| | TTGATTCCCATACTTACAAG | | | |
| Nitab4.5_0000 | TCTGAACCAAATAAAGATTTTTGCTCTTTAATATACTCCATAT | 358 | [C/T] | Y |
| 535\|333529 | AATCTGA[C/T]TGCACTGATCCTAGATCCGATAATTTTGTCTC | | | |
| | ACCCATTACAAACTGCTC | | | |
| Nitab4.5_0000 | ATCACTGCACAGGGTACAATCATTGCAACATCAATGACCTAT | 359 | [C/T] | Y |
| 535\|336046 | CCTGAGTC[C/T]GAGCTCACTCTCTAGTTGCACCAGTCCATTC | | | |
| | ACTCCTCGTGGACATCAAT | | | |
| Nitab4.5_0000 | CCCCAAATCGCTACTAACTTTAAACCTTTCCGGGCATCATCTT | 360 | [C/T] | Y |
| 535\|336533 | TCTCGAG[C/T]CKTCAACATTAGAAACACTGACTCAATCCTGA | | | |
| | ACCACTGCACCCCGCGAT | | | |
| Nitab4.5_0000 | CCAAATCGCTACTAACTTTAAACCTTTCCGGGCATCATCTTTC | 361 | [G/T] | K |
| 535\|336535 | TCGAGYC[G/T]TCAACATTAGAAACACTGACTCAATCCTGAA | | | |
| | CCACTGCACCCCGCGATCT | | | |
| Nitab4.5_0000 | AAATACCAAGTCTCATTACTCCATCAACCCAAATTTGAACATT | 362 | [C/T] | Y |
| 535\|336771 | CTTAGTC[C/T]GATTGCCTTTCCCCTGCTGGGAATAAAATACC | | | |
| | AAATCTCTAGATCATGCA | | | |
| Nitab4.5_0000 | GGAAACATCCTACCATCATATCAATACTGCGGAACAATCGTT | 363 | [C/T] | Y |
| 535\|336916 | CATAGCAT[C/T]ATGGCAACTTGTGCCTAGCCTCAGAGCTCT | | | |
| | CAGAAGTACTGCTACTGAGC | | | |
| Nitab4.5_0000 | ATCAAATCGCACGATGAGGAATCAAGAAGGGAAGTACTCCT | 364 | [G/A] | R |
| 535\|337195 | AATAGCCCT[G/A]TAGCCTCCCGAGATAAGTACAGACATCTC | | | |
| | CTGTCACGATCCAAACCGAAG | | | |
| Nitab4.5_0000 | CCTCTGTGGGCATCATCATCATCATATTGTACTAGCCTCAAA | 365 | [A/G] | R |
| 535\|337944 | GAGGACTC[A/G]GTAAAAGCGTACCCGACCATCATAAGGTT | | | |
| | CAGTAGAATCGTACCCGGCCA | | | |
| Nitab4.5_0000 | CACCGCCTAAGTGGGTCCCATTGGGAGCTTCTTGCGCGGTCT | 366 | [C/T] | Y |
| 535\|342273 | CGCGAAAA[C/T]GCGAATATCTCTCTACTCTGATATCGTATTG | | | |
| | ATGAACGGTTTAATGCGTT | | | |
| Nitab4.5_0000 | CGATCGCGCTGCTAATACAAGAATCACCATACAGAGCTATTC | 367 | [A/G] | R |
| 535\|345340 | CCAAACTC[A/G]GAATCCCAAACGAACATCGATAACACTGAA | | | |
| | ATGCAATTCAACCCAAACTT | | | |
| Nitab4.5_0000 | CCGGAATTCAATTCCGACGATGCGCACAAGTCATAATACCCG | 368 | [T/C] | Y |
| 535\|345668 | AAGTGAAG[T/C]TGTTCATGGCCTCAAACCGCCGAAAAACAT | | | |
| | GCCAAAGCTCAAAACGACCG | | | |
| Nitab4.5_0000 | TAATTAGATTAGTGGACTGCCACGTTTCCCTTGTTAGGGGAT | 369 | [T/A] | W |
| 535\|346524 | TTAAATTT[T/A]ATCTAATAATTAATTAATTAGGTAATATYCC | | | |
| | GCTACCTGGTAATTAACCA | | | |
| Nitab4.5_0000 | CTTGTTAGGGGATTTAAATTTWATCTAATAATTAATTAATTA | 370 | [C/T] | Y |
| 535\|346553 | GGTAATAT[C/T]CCGCTACCTGGTAATTAACCAATTACCCGTA | | | |
| | AAATAAAAAAAATTGCCCC | | | |
| Nitab4.5_0000 | TTGTTGGTTGGAAGAATTGCCCCTTTGGCCCTGATAATTGTT | 371 | [G/A] | R |
| 535\|349363 | CACATATT[G/A]AACTTCTTCATTCTGCCCATCATAATCATCA | | | |
| | TCTTGAAATCCACTACAAT | | | |
| Nitab4.5_0000 | GAACTTATCCTCCAACTCATCCCAAGTAGTGATGGAATGGTT | 372 | [G/T] | K |
| 535\|349990 | GGGAAGTC[G/T]CTCAAGCCAATCTAATACCTTCCCCCCCTA | | | |
| | AGTGATAAAGGGAATAATCT | | | |
| Nitab4.5_0000 | ATACACTAAACTTCTCACTCTATACCTATCGGTAGTTTGAGTG | 373 | [C/G] | 5 |
| 535\|350939 | ATTTTGC[C/G]CTAATTGACTTTCTCAAGACCAATTGGGTATG | | | |
| | ATAATTTGTGCAAGCAAT | | | |
| Nitab4.5_0000 | TGATATCCTGGTGTACTCTTGTAGCAGAAGGAGCATGCCCAT | 374 | [G/A] | R |
| 535\|352791 | CATTTGCG[G/A]ATTGTATTGCAGYGGTTGAGAGAGGAGAA | | | |
| | ACTTTATGCTAAGTTCTCTAG | | | |
| Nitab4.5_0000 | TACTCTTGTAGCAGAAGGAGCATGCCCATCATTTGCGRATTG | 375 | [C/T] | Y |
| 535\|352804 | TATTGCAG[C/T]GGTTGAGAGAGGAGAAACTTTATGCTAAG | | | |
| | TTCTCTAGGTGTGAGTTTTGG | | | |
| Nitab4.5_0000 | GGAGTGGAAGTGAGAGCGGATCACCATGGATTTCATAGTTG | 376 | [G/A] | R |
| 535\|354051 | GGATCCCAC[G/A]GAACTCGAGGAGGTTCGATTTTGTTTGG | | | |
| | GTGATTGTGGATCGACTGACCA | | | |
| Nitab4.5_0000 | TATGAGCTTGCCTTACCACCTAGCTTGTCGGGGGTGCATCCA | 377 | [T/C] | Y |
| 535\|354819 | ATATTTCA[T/C]GTTTCTATGCTCYAGAAGTATATTAGCGATC | | | |
| | CGTCTCATGTTTTGAATTT | | | |
| Nitab4.5_0000 | TACCACCTAGCTTGTCGGGGGTGCATCCAATATTTCAYGTTTC | 378 | [T/C] | Y |
| 535\|354832 | TATGCTC[T/C]AGAAGTATATTAGCGATCCGTCTCATGTTTTG | | | |
| | AATTTCAGCACAGTTCAG | | | |
| Nitab4.5_0000 | TGGATGTGATTTGATAGGTTTTGGCATTGTTGGTAGAATTTG | 379 | [G/A] | R |
| 535\|355608 | GAAGTTTC[G/A]AGGTTCATTAGGCTTAAATCCGTGTGCAAG | | | |
| | TCGTGTTTTTGATGTTGTTC | | | |
| Nitab4.5_0000 | GGACGTGTTGGTATGTTTGGTTGAGGTCCCGAGGGCCTCGG | 380 | [G/A] | R |
| 535\|355749 | GTTGATTTC[G/A]GGTGGTTAACAGAATAAGATTGAAGTTTG | | | |
| | AAGGATTRCTGTAGTCTGGTG | | | |
| Nitab4.5_0000 | TCGGGTTGATTTCRGGTGGTTAACAGAATAAGATTGAAGTTT | 381 | [G/A] | R |
| 535\|355786 | GAAGGATT[G/A]CTGTAGTCTGGTGTTTTTGCACCTACGGTG | | | |
| | GGGAGCCAGCAGGTGCTGAC | | | |
| Nitab4.5_0000 | GCGAGGTCGTGTACTTGCTGAATTAGATGCTAATTGTTGTTT | 382 | [G/A] | R |
| 535\|356948 | TGTACTCA[G/A]CCATAGCTTTTTTTGCTTATTATGCCTCCGTC | | | |
| | TCTTATCATTGTTGAAAC | | | |
| Nitab4.5_0000 | CCGAGTGATTGAGCTATTGAGATGAGCTAAGTGATTGTTGC | 383 | [C/T] | Y |
| 535\|357398 | CTTGAGAGG[C/T]TGTACTTGCTTTCGGTTATTGTTGCACTAG | | | |
| | TTGCTATTTGCCCTTATTGT | | | |
| Nitab4.5_0000 | TTCACGACTTCAACATGGTAAGTATCATATATCAGAAAGTGA | 384 | [C/T] | Y |
| 535\|359956 | TTATATTT[C/T]ATAAATCCATGGTTATATTCATCGTTTAATTT | | | |
| | AGATTTAAATGGAAGAAA | | | |
| Nitab4.5_0000 | AGGAGCGATAAGGGTGGCTATTGATATTGTCAGGGCGGAG | 385 | [G/T] | K |
| 535\|360937 | GGATAAGAGA[G/T]GCTATTATATGAGTGATAAGGGTGTAT | | | |
| | ATATGAGCAATAAGGGTGGTTAT | | | |
| Nitab4.5_0000 | TTCTGCACATTTTGTGCAGAGCTAGGTACTAAAGCTTTCAGA | 386 | [T/G] | K |
| 535\|361967 | CTCGAGCA[T/G]AGTTAGTGTGTTGATTGCAAGGATTTAAGG | | | |
| | TAGAGTTGCTTGGTCGTCAT | | | |
| Nitab4.5_0000 | TGCAAAATATAGAAGTTCAAAGATTTGAAAACTTATAATTTG | 387 | [C/T] | Y |
| 535\|365559 | ATTCGATG[C/T]GCGATTCATAATTTCGACATTTTTTGATGTG | | | |
| | ATTTGAAGTATCGACTAAG | | | |
| Nitab4.5_0000 | TGTGTTTGGATTTCATGAAAATTATGTAGGGTTCTGAGAGGC | 388 | [C/T] | Y |
| 535\|366358 | GAGTCCCG[C/T]GTTGACTTGTGGTTGACCTTTTTGTAACGA | | | |
| | CCCGACCATTTATTTGAGAG | | | |
| Nitab4.5_0000 | GATTGCATTTTGGATGTCTGTAGCTCATTTAAACTTGAAATG | 389 | [C/T] | Y |
| 535\|366691 | GCGAAAGT[C/T]GAATTTTTGGAGTTTTGGTCCGATAGTAGA | | | |
| | ATTTTTGATATCAGGGTCGG | | | |
| Nitab4.5_0000 | TGCGGTCTCAGCCCATTTTAAATTAATTTCGCACCTGCGATG | 390 | [G/A] | R |
| 535\|367265 | GTTTTCCC[G/A]CAGGTGCGGGCCGCAAATACGTGTGAGTA | | | |
| | ACCGCATGTGCAGTTTAACTA | | | |
| Nitab4.5_0000 | TAGATTCTGGAGTATAGAATTACTGTTTCCTTTCTATAGTTTG | 391 | [C/T] | Y |
| 535\|368361 | TGACTTA[C/T]GACATTCCGGGTTTTGGGAGAGGTTATGTGC | | | |
| | ACCTCGAGAGTGGTTATTG | | | |
| Nitab4.5_0000 | TTCTGCATTGGTTTTTCGGCCGTCGAGGTCGAGCCGTGAAAT | 392 | [G/A] | R |
| 535\|372498 | CAATTACT[G/A]ATGTATCAGAATAGGTTGCTTACATTATATC | | | |
| | TTTTGGAATGTGATTTTAT | | | |
| Nitab4.5_0000 | AAAAGTCAGTTTTGATAAAAATACATTGTGTAGAGGCGTAG | 393 | [A/G] | R |
| 535\|374002 | CAAGATTTT[A/G]CACTTTATAAGTTCTAAATTTAAAATAGCG | | | |
| | ACACCAGTTATTAATAATTG | | | |
| Nitab4.5_0000 | TAGTAAATTATTGTTATATACAGATGCTGTTATAGAGAAGTC | 394 | [C/T] | Y |
| 535\|374421 | TGATTGTT[C/T]TAATTATTTATTCATAATAGCAAACATCAGC | | | |
| | TATGTTTGGCTTTTTAAAA | | | |
| Nitab4.5_0000 | GTAACTAAGATAAGCAGTGGATTCAATAATAAATTTAGAACC | 395 | [T/C] | Y |
| 535\|375362 | CATAAACT[T/C]CATATCCTAGCTCCGGCACCGAGCAGCTCA | | | |
| | AAATATTACCATTTTAAAAA | | | |
| Nitab4.5_0000 | TACCAAAAAGAATTACATTTGATGTAAAGAGGATTACACTGA | 396 | [T/A] | W |
| 535\|228474 | ACAACTAC[T/A]TATTTTCGTTTATTAGAAAATGGACTTTCAT | | | |
| | TCATTATCATTAGTACACA | | | |
| Nitab4.5_0000 | CCTTCTTCTACTCCCCTTTCTCCCCTACTCGTCGACTTAGCTGC | 397 | [T/G] | K |
| 535\|236506 | TCGATT[T/G]GAATTTGGTTTGTTTGAGACCTCAATGATCACT | | | |
| | TCATTTTCCGATCCTTT | | | |
| Nitab4.5_0000 | TTGTAGAGAGGGGATTTTTCTGATAAGCATATGCTATATTCT | 398 | [C/A] | M |
| 535\|242933 | ACCAAAAG[C/A]TCAATAATACTTTACTTTTCCTGCTTATTTG | | | |
| | CATTGTTCTTACTGACTCT | | | |
| Nitab4.5_0000 | AGAATCTTATCAGGTATGGAGATATTTTCAGGTACCAAAAGA | 399 | [G/A] | R |
| 535\|245534 | AAACGGAC[G/A]CAACAAAGTCCACAGGGAAGAACTTGAAC | | | |
| | AAGTCGCATAGTTTGAAAAGT | | | |
| Nitab4.5_0000 | ACCTGGGAATGCCTAACACCTTCTCCCGTGTTAATAAAATTC | 400 | [G/A] | R |
| 535\|247977 | CTTGCCCG[G/A]ATTTCTGTGTTCGCAAACCATAATTAGAGTT | | | |
| | AAACCTTCCTCGATGCTAG | | | |
| Nitab4.5_0000 | AGCTAGCACTTGCAACTAGCAAGCGTCAAGGTTCCAATCCAA | 401 | [T/A] | W |
| 535\|263142 | AGTCTACA[T/A]GAAGAACCATTCAAGACTCAAGATCAAGCT | | | |
| | TCAGAAGACTTATAGATAGG | | | |
| Nitab4.5_0000 | CTGAGTTCTGCTCGAGTTTCAAGTTCGAGGTGTTGTCCGAGT | 402 | [T/A] | W |
| 535\|264309 | TTAAGGTC[T/A]TGAACAGTGATTAAAGTGTGGGTTTGAATC | | | |
| | CGTGTTTGGTTGAGTTTCCG | | | |
| Nitab4.5_0000 | ATCTCTTATAAAAATCCTCACGTTAAAGGGTTGATTTCGGAA | 403 | [G/A] | R |
| 535\|270041 | GAACTTAT[G/A]CCTGGAATCCAAATGTTCTTAGAGGGAAAT | | | |
| | ACACCCGAAATCTTGCATAA | | | |
| Nitab4.5_0000 | AGGAAGAGAAGCATCTACGCCCCTAGAAGAAATGGGTGGA | 404 | [A/G] | R |
| 535\|270356 | TCCTCCCCCG[A/G]TTCGATATTTTGGCCTTCGTCATTTTAGT | | | |
| | CTTCAGCATCATCGCCTTCCG | | | |
| Nitab4.5_0000 | TTCTAACCACTTTTTGGCCAAATAAGTCATTTTGCAAAAATAG | 405 | [C/T] | Y |
| 535\|275825 | CCTCAAT[C/T]CTGTCTTGCATGTGTCTAGTAGGGAATGTTAT | | | |
| | TGTCTCACATAGTATTGG | | | |
| Nitab4.5_0000 | GTAACACTCTAGTCCAAGCAGGAAAAATAATGAAAATGAGA | 406 | [C/T] | Y |
| 535\|281378 | GAGTCTTAT[C/T]GGTGAAAACCCTTACAGGCACCGTAAGGC | | | |
| | GAAGGGAGCTGAGAGAAATCA | | | |
| Nitab4.5_0000 | GCTAACACATAAAATGTCATAAGTCAGAAAAGAACAACAGG | 407 | [C/T] | Y |
| 535\|281986 | TGCATTGAG[C/T]TGGTAATAATCAACATGCTTTGGGATCCT | | | |
| | GTGAAAATCAAAGGTTGGTAC | | | |
| Nitab4.5_0000 | GTTAAAATCGAACCACAGTCTAAAATATGTACTAAAATCAGA | 408 | [C/T] | Y |
| 535\|286896 | TAATAAGC[C/T]GAATATAGYAGTTGAGCGACCGTGCTAGAA | | | |
| | CCACGGAACTCGGGAATGCC | | | |
| Nitab4.5_0000 | GAACCACAGTCTAAAATATGTACTAAAATCAGATAATAAGCY | 409 | [T/C] | Y |
| 535\|286905 | GAATATAG[T/C]AGTTGAGCGACCGTGCTAGAACCACGGAA | | | |
| | CTCGGGAATGCCTAACACCTT | | | |
| Nitab4.5_0000 | TACAACGATAACCGGCAAAAGTGATGCTAAATCAAGGGATG | 410 | [T/C] | Y |
| 535\|288224 | ACGCGTGTT[T/C]AGCCCCAACCCACTCATGGCTGCATCTGC | | | |
| | GATAGACAACTCGCTTCTGCG | | | |
| Nitab4.5_0000 | AATGTATTTTTTTGTTTTGGTGATGGGCCAGTCTAGAGGACT | 411 | [G/T] | K |
| 535\|289459 | TGAGGCAC[G/T]GTTTGGACCTTAGCTTAGGCTCTATAGTTT | | | |
| | CAGTTGTGTGAGCATGTGCT | | | |
| Nitab4.5_0000 | TGCAAGATGTGTTCAGATGGTTTGAATGTAACTGGAAGAGT | 412 | [A/G] | R |
| 535\|289649 | TTGCTTGAG[A/G]TGTGAAAAATGACTATTGGATGCTCGATT | | | |
| | TATGTGGATGTGTCATATAGT | | | |
| Nitab4.5_0000 | GGATGCAATCTTTAACCATTAATTTTTAGGTTTCAAGTTCGAG | 413 | [A/G] | R |
| 535\|290239 | ACATAAG[A/G]ATTGAGAAAATCCTTTACAATGAGATTTTCT | | | |
| | CTTTAGCAAGCCTCGAGGT | | | |
| Nitab4.5_0000 | TAATATTAAGTTCGTAGAATAGTTTCAGTTTATTTGTTGAAAA | 414 | [A/T] | W |
| 535\|296059 | CTAATTT[A/T]AAAAAAAGAAGAGTAAGAGATTATTCTTTTA | | | |
| | ATCTAGTGCGAATATTAAT | | | |
| Nitab4.5_0000 | TCATCAGGGCTTACCTCAACATTTCATTAATTGTTGCTAGAGC | 415 | [G/A] | R |
| 535\|302118 | TGCCAGA[G/A]ATAGAGTCGAGATTTGAAACTTATGGGTTCA | | | |
| | GAATTCTAGTCTTTTTAAG | | | |
| Nitab4.5_0000 | AGATTGTACATCCTCCTTATTTTTGGTAATCTTGTCACCTTCAC | 416 | [C/T] | Y |
| 535\|311720 | CCTCCC[C/T]CTTCTCTTGAGAAACCTTTTTCTTTTCTAGAGCC | | | |
| | CTACAATTGACTATGT | | | |
| Nitab4.5_0000 | CAAAAAAAAATTACTTTTATATTTCCTTTAGGATATTAGGACT | 417 | [C/A] | M |
| 535\|316145 | AAAAATT[C/A]AAAAAAAAAATATGATTTTTCTCTTTTGGTAT | | | |
| | CTCTTTACAAATTTTCTT | | | |
| Nitab4.5_0000 | ATTTTATTTTGCTTAGTTTGTTTAGTCATAATAGCCCGTTTAG | 418 | [T/A] | W |
| 535\|323584 | TGTTGTC[T/A]AGGTTTGTAACCCCAATTTAGTTTGTTTGTTTT | | | |
| | GTTGTCCAAATCCTTTC | | | |
| Nitab4.5_0000 | TCTGAACCAAATAAAGATTTTTGCTCTTTAATATACTCCATAT | 419 | [C/T] | Y |
| 535\|333529 | AATCTGA[C/T]TGCACTGATCCTAGATCCGATAATTTTGTCTC | | | |
| | ACCCATTACAAACTGCTC | | | |
| Nitab4.5_0000 | ATCAAATCGCACGATGAGGAATCAAGAAGGGAAGTACTCCT | 420 | [G/A] | R |
| 535\|337195 | AATAGCCCT[G/A]TAGCCTCCCGAGATAAGTACAGACATCTC | | | |
| | CTGTCACGATCCAAACCGAAG | | | |
| Nitab4.5_0000 | CGATCGCGCTGCTAATACAAGAATCACCATACAGAGCTATTC | 421 | [A/G] | R |
| 535\|345340 | CCAAACTC[A/G]GAATCCCAAACGAACATCGATAACACTGAA | | | |
| | ATGCAATTCAACCCAAACTT | | | |
| Nitab4.5_0000 | CCGGAATTCAATTCCGACGATGCGCACAAGTCATAATACCCG | 422 | [T/C] | Y |
| 535\|345668 | AAGTGAAG[T/C]TGTTCATGGCCTCAAACCGCCGAAAAACAT | | | |
| | GCCAAAGCTCAAAACGACCG | | | |
| Nitab4.5_0000 | TAATTAGATTAGTGGACTGCCACGTTTCCCTTGTTAGGGGAT | 423 | [T/A] | W |
| 535\|346524 | TTAAATTT[T/A]ATCTAATAATTAATTAATTAGGTAATATCCC | | | |
| | GCTACCTGGTAATTAACCA | | | |
| Nitab4.5_0000 | TACTCTTGTAGCAGAAGGAGCATGCCCATCATTTGCGGATTG | 424 | [C/T] | Y |
| 535\|352804 | TATTGCAG[C/T]GGTTGAGAGAGGAGAAACTTTATGCTAAG | | | |
| | TTCTCTAGGTGTGAGTTTTGG | | | |
| Nitab4.5_0000 | TACCACCTAGCTTGTCGGGGGTGCATCCAATATTTCATGTTTC | 425 | [T/C] | Y |
| 535\|354832 | TATGCTC[T/C]AGAAGTATATTAGCGATCCGTCTCATGTTTTG | | | |
| | AATTTCAGCACAGTTCAG | | | |
| Nitab4.5_0000 | GGCTCCAGGTATGTTTCTAGACCCATTCGAGGATGAACGTTT | 426 | [G/T] | K |
| 535\|355109 | GTTTAAGA[G/T]GGGGAGGATGTAACGACCCAGCCGGTCGT | | | |
| | TTCGAGAGTTATAGCCCCATT | | | |
| Nitab4.5_0000 | TGGATGTGATTTGATAGGTTTTGGCATTGTTGGTAGAATTTG | 427 | [G/A] | R |
| 535\|355608 | GAAGTTTC[G/A]AGGTTCATTAGGCTTAAATCCGTGTGCAAG | | | |
| | TCGTGTTTTTGATGTTGTTC | | | |
| Nitab4.5_0000 | TCCTTTAGCCTATATTGATTGTGTTGTACTACTTTTGGCTAGA | 428 | [C/T] | Y |
| 535\|356468 | TTCGGGA[C/T]GTTTGGAGGCCAGTTCGAAAGGCAAAGGCA | | | |
| | TTGCGGAGTAGGATTTTACT | | | |
| Nitab4.5_0000 | GTGAAAGACTGTATGGCCTTGTCGGCCTATGGTCAGTGTAC | 429 | [T/A] | W |
| 535\|359555 | GAGTGATCA[T/A]TTTGGTCTTATAGGCCAATATGTCTTATGT | | | |
| | ATAAGGTGGTATTACATATT | | | |
| Nitab4.5_0000 | TTCTGCACATTTTGTGCAGAGCTAGGTACTAAAGCTTTCAGA | 430 | [T/G] | K |
| 535\|361967 | CTCGAGCA[T/G]AGTTAGTGTGTTGATTGCAAGGATTTAAGG | | | |
| | TAGAGTTGCTTGGTCGTCAT | | | |
| Nitab4.5_0000 | GGGAGATTTGATGGTGTTAGCCTATGTCTATCATTTTGTTTT | 431 | [T/C] | Y |
| 535\|364083 | GTACACTA[T/C]TGAGGGTTATGAGTCCAAAAGTGACTTTCT | | | |
| | ATTACTCACTACAGTGGGTT | | | |
| Nitab4.5_0000 | GATTGCATTTTGGATGTCTGTAGCTCATTTAAACTTGAAATG | 432 | [C/T] | Y |
| 535\|366691 | GCGAAAGT[C/T]GAATTTTTGGAGTTTTGGTCCGATAGTAGA | | | |
| | ATTTTTGATATCAGGGTCGG | | | |
| Nitab4.5_0000 | CCCTTGTCCAGCTAGGCTGCAGGTGCAGTGAGGGATCCGCA | 433 | [G/A] | R |
| 535\|367169 | GAAGCATAA[G/A]CGCAGAAGTGGTTGGGGACCGCAAGTG | | | |
| | CGGCCTAGTGCTCGCAAATGCGG | | | |
| Nitab4.5_0000 | CATTCTGCATTGGTTTTTCGGCCGTCGAGGTCGAGCCGTGAA | 434 | [C/T] | Y |
| 535\|372496 | ATCAATTA[C/T]TRATGTATCAGAATAGGTTGCTTACATTATA | | | |
| | TCTTTTGGAATGTGATTTT | | | |
| Nitab4.5_0000 | TTCTGCATTGGTTTTTCGGCCGTCGAGGTCGAGCCGTGAAAT | 435 | [G/A] | R |
| 535\|372498 | CAATTAYT[G/A]ATGTATCAGAATAGGTTGCTTACATTATATC | | | |
| | TTTTGGAATGTGATTTTAT | | | |
| Nitab4.5_0000 | TAGTAAATTATTGTTATATACAGATGCTGTTATAGAGAAGTC | 436 | [C/T] | Y |
| 535\|374421 | TGATTGTT[C/T]TAATTATTTATTCATAATAGCAAACATCAGC | | | |
| | TATGTTTGGCTTTTTAAAA | | | |
| Nitab4.5_0000 | ACTAGAGCTGAAGTTCGCCAGTTACAAAAATAAAAACTTCAG | 437 | [G/C] | S |
| 535\|229285 | CACACTTG[G/C]TTCAGCACACTTGCTACTTCAGGTCCGTCTA | | | |
| | CTAGAATGCTGAAGTTTTA | | | |
| Nitab4.5_0000 | CGTATGCTGAAGTTATGTGAAAAAACGGGTACGCTTGCAAT | 438 | [C/T] | Y |
| 535\|229412 | TTGTTTTTG[C/T]AAAGCGGGCACAAGTTAAAACGTGACACA | | | |
| | AAAAGCGGATATAGATGTAAA | | | |
| Nitab4.5_0000 | CTTAAAGGAGCAATAGGAGGCCATAATATGTCATCCCACACT | 439 | [A/G] | R |
| 535\|243475 | GCAGGATC[A/G]GGTTATGACGGAATTAAAGCAAGCGTTAT | | | |
| | TGGGTGTATCCAATAATGAGA | | | |
| Nitab4.5_0000 | CGGCGCATGCTCCCAAGCCAAGCGAAGCTAACCAGGGGGA | 440 | [G/A] | R |
| 535\|245485 | GGAGTCGTCA[G/A]AATCTTATCAGGTATGGAGATATTTTCA | | | |
| | GGTACCAAAAGAAAACGGACGC | | | |
| Nitab4.5_0000 | ATAATTAGAGTTAAACCTTCCTCGATGCTAGATTTTAAACCG | 441 | [A/C] | M |
| 535\|248047 | GTGACTTG[A/C]GACACCAATAAACTATCCCAAGTGGCGAM | | | |
| | TCTGATTTTTATATGAATAAT | | | |
| Nitab4.5_0000 | AGATTTTAAACCGGTGACTTGMGACACCAATAAACTATCCC | 442 | [C/A] | M |
| 535\|248076 | AAGTGGCGA[C/A]TCTGATTTTTATATGAATAATCCCGTTTCG | | | |
| | ATTGTCACTTAAATTGAAAA | | | |
| Nitab4.5_0000 | TGAATGATGAATTGATTTTGTCATTTGAAAGTTAAACAAGTA | 443 | [G/T] | K |
| 535\|269931 | CTTCAAAT[G/T]CTAGTTCCGTAATGAACAGCAGAAGTCCTC | | | |
| | TTCAAGAGCACCGTAAACAT | | | |
| Nitab4.5_0000 | GGGGAAGAGGTACGTCGACCTTTCGGGAAACTGCGATCGGT | 444 | [G/A] | R |
| 535\|271398 | AGAGATGAT[G/A]CAGTAATTACTGGTGGCAGAAACAGAGT | | | |
| | TGGTGAAGAAGGAGATGAAGTT | | | |
| Nitab4.5_0000 | GCTAGTCCTTTCCACGTGCGGGTTCTGGGTGTAGACATGTGA | 445 | [C/A] | M |
| 535\|272053 | TTTTTGAC[C/AJCTCCCCAAGATTTTTCATAAGCATGTAAATA | | | |
| | TTTAATTTAGGCCTAATAT | | | |
| Nitab4.5_0000 | ATGTAAATTAAAGTGTAGTATTTATACATGTCCTAATAATTTC | 446 | [G/A] | R |
| 535\|274556 | GAATTTC[G/A]GATTGGATTGGATTAAAATATACCAATCCGA | | | |
| | AATCCGATCCGAAATCCGA | | | |
| Nitab4.5_0000 | GAGTCAATACCCCGATTGGTGAAGAAGAAATGGTTGAGCTT | 447 | [G/T] | K |
| 535\|279103 | TTCCTACAA[G/T]CCTAGGGTCCCACCTACTTTAGTCATTTGA | | | |
| | TCCCGGCCCTGGGGAAGCCT | | | |
| Nitab4.5_0000 | GGAAGAGTTTGCTTGAGATGTGAAAAATGACTATTGGATGC | 448 | [G/A] | R |
| 535\|289682 | TCGATTTAT[G/A]TGGATGTGTCATATAGTCTTGAGTTATAA | | | |
| | AGGTTTTTGAGAAATTCTTTC | | | |
| Nitab4.5_0000 | ATATATAATTCCAAATAAGTTTGAGGTCAGCTATATGAATAT | 449 | [C/G] | s |
| 535\|290818 | TTATTATT[C/G]ATATCGCTCTATTTAAACTTATTTAAATTAAA | | | |
| | TTAACTAATTTTATATTA | | | |
| Nitab4.5_0000 | ATCTTAGTTCGAATCCAAGACCTCTAATTAAGAGTAAAAGGA | 450 | [G/A] | R |
| 535\|295774 | TCCTATCC[G/A]TCACACTATAATCCTTGTTGATGGGAACCTC | | | |
| | TTTCTTCAACTCTCCTAAA | | | |
| Nitab4.5_0000 | TAGCTTCGTATTATATTTTTTTCCCATGGAGCTAGAAATAATT | 451 | [G/A] | R |
| 535\|295882 | AAATAAG[G/A]TATATATATTTTTGATCATTTGGATATAACCA | | | |
| | TGATACCTCGTTACTTCC | | | |
| Nitab4.5_0000 | TATATAATATATGCTAATTAAACACAGCTATTCATATATTATA | 452 | [G/A] | R |
| 535\|299003 | CATAAAC[G/A]TATATATTATACATAAACATATATATTATGCA | | | |
| | TTCCTCGTGTAAGTAGTT | | | |
| Nitab4.5_0000 | CTGCTTATGCTTTTTTGAGCCGAGAGTCTATTGGAAACAACC | 453 | [C/T] | Y |
| 535\|302771 | TCTCCATA[C/T]TCACAAAGTTGGGATAAGGTCTGCGTACAC | | | |
| | ACTACCCTCCCAGGCCCACG | | | |
| Nitab4.5_0000 | CATTCTCAGTATCACTGCCCCTTTTGTAGTTCATGTTGATTCT | 454 | [C/T] | Y |
| 535\|311059 | GTTCGTG[C/T]TGCCTTCGTTAACCTCTTGCTCCCATTCTTTTC | | | |
| | CATCCAAGTCGATAACT | | | |
| Nitab4.5_0000 | AAGAGGATCAAAGGCCATTGTTTGTTGCTATTGTGGTGCCAT | 455 | [T/G] | K |
| 535\|313843 | TTAACATC[T/G]ACATGGATCTGGCACGGTTTTGGTGTTTTTT | | | |
| | TTGTCACTTTGGTTTTGGT | | | |
| Nitab4.5_0000 | GTGCGTAGTTGCTTTAGGCGTGCTATTTTAAAATTACCTTCCT | 456 | [G/A] | R |
| 535\|314236 | AAACTCG[G/A]GTGTGCATTTATGTGACCAAATCCAAGTCTC | | | |
| | AACAACGTTAGATAAAATG | | | |
| Nitab4.5_0000 | TCTCATCTTCGGGGATGTGCTCGCTGGTCGAGACTCCTTATT | 457 | [G/A] | R |
| 535\|314848 | CTATTAGT[G/A]TCATACCTTGAAAGTAAGAAAGAGGCTCGG | | | |
| | ACAAGTTACTAAGCCGGATG | | | |
| Nitab4.5_0000 | AGTATGTTCTATCCTATGTGAATAAAATCTCAAAATGCATGG | 458 | [T/C] | Y |
| 535\|329401 | CCCTCACT[T/C]ATTTTTTTTAATCCTTAGAAATCGAGGCGTG | | | |
| | CCATTTAATTGAATTTCCA | | | |
| Nitab4.5_0000 | ACTACTAAAGATAACAATATCATCAGCATATGCCAAGTAATT | 459 | [G/A] | R |
| 535\|331807 | GATTTGAG[G/A]GCCCCTATGAGACATAGAGCAAGGTATAA | | | |
| | AATTATTATTGAGTTTCTAGT | | | |
| Nitab4.5_0000 | ATCACTGCACAGGGTACAATCATTGCAACATCAATGACCTAT | 460 | [C/T] | Y |
| 535\|336046 | CCTGAGTC[C/T]GAGCTCACTCTCTAGTTGCACCAGTCCATTC | | | |
| | ACTCCTCGTGGACATCAAT | | | |
| Nitab4.5_0000 | ACTTCAAACCTTTCTTAAGGTGCGTGGTCATCCTACCACAAG | 461 | [C/A] | M |
| 535\|336304 | CCCATATG[C/A]AACTCCGCCACTCTCCCACTTTGGCGAAACT | | | |
| | CACCCCTTTAGTCGACTAC | | | |
| Nitab4.5_0000 | CGCTGAGCTAATAGCCTACTGGAGGACTGTCAACCTATCAAT | 462 | [G/T] | K |
| 535\|337689 | CGAGACCT[G/T]CGGGCATGAAATGCAGCGTCCCCAGGCAA | | | |
| | AAGGGATGTCAGTACAAATAA | | | |
| Nitab4.5_0000 | CCTCTGTGGGCATCATCATCATCATATTGTACTAGCCTCAAA | 463 | [A/G] | R |
| 535\|337944 | GAGGACTC[A/G]GTAAAAGCGTACCCGACCATCATAAGGTT | | | |
| | CAGTAGAATCGTACCCGGCCA | | | |
| Nitab4.5_0000 | TTGTTGGTTGGAAGAATTGCCCCTTTGGCCCTGATAATTGTT | 464 | [G/A] | R |
| 535\|349363 | CACATATT[G/A]AACTTCTTCATTCTGCCCATCATAATCATCA | | | |
| | TCTTGAAATCCACTACAAT | | | |
| Nitab4.5_0000 | ATACACTAAACTTCTCACTCTATACCTATCGGTAGTTTGAGTG | 465 | [C/G] | S |
| 535\|350939 | ATTTTGC[C/G]CTAATTGACTTTCTCAAGACCAATTGGGTATG | | | |
| | ATAATTTGTGCAAGCAAT | | | |
| Nitab4.5_0000 | TCCCTAGTTATCAGGTCACTCAGCCCATTCTATCCCTCCATAC | 466 | [C/A] | M |
| 535\|352310 | CTTATGG[C/A]ACCTGCTGAGTTGAAAGAGTTGAATAAGTAG | | | |
| | CTTCAGGAACTCCTTGAGA | | | |
| Nitab4.5_0000 | AAATTTCCAAGATGTTAGATCGTGTTTAAAGTGAGGAAAGG | 467 | [C/T] | Y |
| 535\|363439 | GAGCCTAAG[C/T]AGGCCAAAAGGTCTCAAAATTCTGGAGG | | | |
| | ATTCGGTGGATTTTTTTTCTGCA | | | |
| Nitab4.5_0000 | CTTAGAATAGCATGCCTACTTACCTTAATTGCTTATCTGAGCT | 468 | [G/T] | K |
| 535\|367567 | CTGTGCA[G/T]CATGTTTAGTGAAATTTCCTGCTTTTCCTTGA | | | |
| | CTTGTACTTAGTCCACAG | | | |
| Nitab4.5_0000 | TAGATTCTGGAGTATAGAATTACTGTTTCCTTTCTATAGTTTG | 469 | [C/T] | Y |
| 535\|368361 | TGACTTA[C/T]GACATTCCGGGTTTTGGGAGAGGTTATGTGC | | | |
| | ACCTCGAGAGTGGTTATTG | | | |
| Nitab4.5_0000 | TTCGTGTGTTTGTTGATTTGATATTTCCTGAAAATAATTATAT | 470 | [T/C] | Y |
| 535\|368949 | TATAGAC[T/C]TTTTCATCTGCAAATAATTAATTAAATAAGTT | | | |
| | TAAATTGAGATGTTAATA | | | |
| Nitab4.5_0000 | TATAAAACGGGTCAAATATGAATAAGAACCATATTATTCATT | 471 | [G/A] | R |
| 535\|371802 | TAGAAAAT[G/A]GATAACTAATGAGTAAACATGGATAATCA | | | |
| | ATGGGCCTAACATTTACATTT | | | |
| Nitab4.5_0000 | CTGATGTATCAGAATAGGTTGCTTACATTATATCTTTTGGAAT | 472 | [T/C] | Y |
| 535\|372546 | GTGATTT[T/C]ATTTCAAATCCTAAGTAAACATGAGATATTTC | | | |
| | GTGTGCATTGAATTGTTC | | | |
| Nitab4.5_0004 | ATGCTAAATGAATAAGTTCTAATGCATGAAAATAAGTTTCCT | 473 | [C/T] | Y |
| 551\|218036 | AAAGTTTT[C/T]CCCAAAAAGTCAAAAAATGGCCCCAGCCCA | | | |
| | CATGGTTAAAACCCGAGGTT | | | |

TABLE 6
SNPs associated with the Nic3 locus identified in the Examples.

| | | SEQ | | |
|---|---|---|---|---|
| Landmark\|pos | Flanking sequence | ID No. | Variant | iupac |
| Nitab4.5_0001 | TCATGTACTTCACTATTTCTTGCGGATCTATCGTATCGTTGCTT | 474 | [G/T] | K |
| 816\|402186 | CTCTCT[G/T]ATTGTAATTTCCCATGTGCCTTACTATACCGCTA | | | |
| | AGGAAAACAAACAAGA | | | |
| Nitab4.5_0001 | ATTTCTTAATATAAAAAAAGTATTTATTTTCTTGGGACAGACT | 475 | [A/T] | W |
| 816\|402319 | AAAAAAG[A/T]AAGTGTATCACATAAATAGGGACAAATGGA | | | |
| | GTAATAATGTTACTTTATAT | | | |
| Nitab4.5_0001 | TAGAATGCTTAAGTTCAACAATTACAAACAAAAACTTCAGCC | 476 | [G/A] | R |
| 816\|404520 | AATACTAA[G/A]TTTATGCGAAATTTTTTAGCTAAAACATGCT | | | |
| | AAAGTTCARCAAATAGAGA | | | |
| Nitab4.5_0001 | CCAATACTAARTTTATGCGAAATTTTTTTAGCTAAAACATGCTA | 477 | [G/A] | R |
| 816\|404560 | AAGTTCA[G/A]CAAATAGAGAACAAAACTTCAGCTAGTAGA | | | |
| | ATGCTTAAGTTCGGCAATTA | | | |
| Nitab4.5_0001 | CAGATCTGCAGGTGAGAAAATGTCAAATGTAGTAGGCGTAA | 478 | [A/G] | R |
| 816\|406176 | GAGAGTGAG[A/G]CTCTGCCTATAAAAGGAGAGCTTCAGCT | | | |
| | CTCATCTCGACACACTAATCTC | | | |
| Nitab4.5_0001 | CGCTACAACATGAAGAATGATAAGCTAGTCAGCACACCTCTT | 479 | [T/A] | W |
| 816\|409526 | GCTAGTCA[T/A]CTAAAGTTGAGCAAAAAGATGTGTCCTACA | | | |
| | ACAGAAGAGACGAAAGGGAA | | | |
| Nitab4.5_0001 | GTTCCTTCAAGAGCTTGGATTGCATCAGAAGGAGTATATCAT | 480 | [A/G] | R |
| 816\|409791 | CTATTGTG[A/G]CAGTCAAAGTGCAATAGACCTGAGCAAAA | | | |
| | ATACCATGTATCATGCAAGGA | | | |
| Nitab4.5_0001 | CAGATCTGCATGAGAGAAAATGTCAAATGTAGTAGGCGTAA | 481 | [A/G] | R |
| 816\|410234 | GAGAGTGAG[A/G]CTCTGCCTATAAAAGGAGAGCTTCAGCT | | | |
| | CTCATYTCGACACACYAATCTC | | | |
| Nitab4.5_0001 | GGCGTAAGAGAGTGAGRCTCTGCCTATAAAAGGAGAGCTTC | 482 | [T/C] | Y |
| 816\|410268 | AGCTCTCAT[T/C]TCGACACACYAATCTCAGAAGAAAAATATA | | | |
| | TCTGAGAGTTAGAAAGAAAG | | | |
| Nitab4.5_0001 | AGTGAGRCTCTGCCTATAAAAGGAGAGCTTCAGCTCTCATYT | 483 | [C/T] | Y |
| 816\|410278 | CGACACAC[C/T]AATCTCAGAAGAAAAATATATCTGAGAGTT | | | |
| | AGAAAGAAAGAGTGAGGTTT | | | |
| Nitab4.5_0001 | CAGGTTCTGTGTATAGCTCCTTGTAGAATTCAATAATCTCGTT | 484 | [C/A] | M |
| 816\|414572 | CTCTATT[C/A]TTTCTGGATCCTCGATTACTTCATGTCGAATAA | | | |
| | TTATTTGGTCAATGTTG | | | |
| Nitab4.5_0001 | TCATGTACTTCACTATTTCTTGCGGATCTATCGTATCGTTGCTT | 485 | [G/T] | K |
| 816\|402186 | CTCTCT[G/T]ATTGTAATTTCCCATGTGCCTTACTATACCGCTA | | | |
| | AGGAAAACAAACAAGA | | | |
| Nitab4.5_0001 | ATTTCTTAATATAAAAAAAGTATTTATTTTCTTGGGACAGACT | 486 | [A/T] | W |
| 816\|402319 | AAAAAAG[A/T]AAGTGTATCACATAAATAGGGACAAATGGA | | | |
| | GTAATAATGTTACTTTATAT | | | |
| Nitab4.5_0001 | TAGAATGCTTAAGTTCAACAATTACAAACAAAAACTTCAGCC | 487 | [G/A] | R |
| 816\|404520 | AATACTAA[G/A]TTTATGCGAAATTTTTTAGCTAAAACATGCT | | | |
| | AAAGTTCAGCAAATAGAGA | | | |
| Nitab4.5_0001 | ATCTTTGGACCCTTCCGCGAATATTAAAGGCAGCACAATGCA | 488 | [T/C] | Y |
| 816\|405228 | CAAAGTAT[T/C]TTGTATTCACATAGAGTTCGGAAAAAGACC | | | |
| | GCATCAAAAGGAGTGTGATG | | | |
| Nitab4.5_0001 | CAGATCTGCAGGTGAGAAAATGTCAAATGTAGTAGGCGTAA | 489 | [A/G] | R |
| 816\|406176 | GAGAGTGAG[A/G]CTCTGCCTATAAAAGGAGAGCTTCAGCT | | | |
| | CTCATCTCGACACACTAATCTC | | | |
| Nitab4.5_0001 | ACCTACAAAGTGTAAAATTCCTTGCTATAGTGATATCAGTTG | 490 | [A/G] | R |
| 816\|410508 | CTCTTCTC[A/G]GGGCCGTGATTTTTTTTCCCTTATTCAAAAGG | | | |
| | GTTTTCCACGTAAAAATCT | | | |
| Nitab4.5_0001 | AACATTAAATTATTTCTTAATATAAAAAAAGTATTTATTTTCTT | 491 | [G/A] | R |
| 816\|402308 | GGGACA[G/A]ACTAAAAAAGAAAGTGTATCACATAAATAGG | | | |
| | GACAAATGGAGTAATAATG | | | |
| Nitab4.5_0001 | AACTTATACCCTAATTTTTTACAACTTTAGGCCCCTCCTTCTTTC | 492 | [C/A] | M |
| 816\|403841 | TGCTAC[C/A]TGTGCGCTCCTTTCTTCTTCATTTCTTTTCCTCTT | | | |
| | CCGCAAATGAAACTC | | | |
| Nitab4.5_0001 | CCAATACTAAGTTTATGCGAAATTTTTTTAGCTAAAACATGCTA | 493 | [G/A] | R |
| 816\|404560 | AAGTTCA[G/A]CAAATAGAGAACAAAACTTCAGCTAGTAGA | | | |
| | ATGCTTAAGTTCGGCAATTA | | | |
| Nitab4.5_0001 | TGCAAGCATTAATAACTGCTTCTATGGTTCGAACTCGTAACCT | 494 | [G/A] | R |
| 816\|405346 | ATAGACA[G/A]CCTACCCATTCGAGAATATATTCTACAAATAT | | | |
| | TGTACAATATAAACAAAA | | | |
| Nitab4.5_0001 | ATGAGGACGAGGAATGCATGCACCTGTCAGGTCCAAAGTCG | 495 | [G/A] | R |
| 816\|407240 | GAATGGGTG[G/A]TTGACACAGCGGCATCTTACCATGCCACA | | | |
| | CCGGTAAGAGATCCTTTTTTGC | | | |
| Nitab4.5_0001 | TGACTTCTATTCGAACAATTTTGAGCTTAGCAGCTAGCCTAG | 496 | [G/A] | R |
| 816\|409014 | ATCTTGAA[G/A]TGGAGCAGTTGGATGTGAAAACTGCATTTC | | | |
| | TTCATGGAGATTTGGAAGAG | | | |
| Nitab4.5_0001 | TCATTTGCTCCTTGTACTTCCATCTCTTCACTCGGTTGTTTTGA | 497 | [G/A] | R |
| 816\|415808 | TCTGTC[G/A]ACGCTTCTTTAAGTGCAAAGCATATCCATTCCA | | | |
| | TTGCCTTTCTACCCATG | | | |
| Nitab4.5_0001 | CCAAGTATCTTTGTTGGAGTTCCATCTGGTGATGTCAAAAGA | 498 | [C/A] | M |
| 816\|415953 | TTTGAATC[C/A]TGCATTGAAGTATATCCTGTTGTCTCCCATA | | | |
| | TTGTACTAAACAGCTGCTC | | | |
| Nitab4.5_0001 | AATTTTGAAAAGTGGCCGGGATTGAGCTCACGCGCCGGCGC | 499 | [G/T] | K |
| 816\|416247 | GTGGTATTT[G/T]GCTCGCCGGAAAGTGCCGCGCGTGGCGG | | | |
| | CGCGTGAGAGACTGTTTGTCGG | | | |
| Nitab4.5_000 | GGAGAAATACGCAAAAGGAATAAAAGCAACGTCAATTAAAAA | 500 | [T/C] | Y |
| 0556\|800382 | TACATATA[T/C]AAAGAAAATAGGAGAAAGCGAAGAGTACCT | | | |
| | CCTCAAAGAATTAGTTGAAT | | | |
| Nitab4.5_000 | GATGATCTACCACAACATGCCCAAAAGTGCGTCCGAGTACAGT | 501 | [C/G] | S |
| 0556\|802274 | TCTTAAT[C/G]GATATCAGCAATAAAAGCTAAAGGAACTAACG | | | |
| | CCCCAATGACATAAACTC | | | |
| Nitab4.5_000 | TCGCAAATGCGAGACTATGTTCGCATTTGCGAGGTGGGTGAT | 502 | [C/A] | M |
| 0556\|804914 | CGAAATTG[C/A]GACGTATGCTGGGGTCTGTCGGGTTCGCATT | | | |
| | TGCGAACTCAGTGTTCGTA | | | |
| Nitab4.5_000 | GGACTCGAGATTAATTTTTTGGGGAATTATGTAAAGATCATAGC | 503 | [A/G] | R |
| 0556\|805520 | TTTATTT[A/G]TTGGAATTAATTTCTCTTGCATTATTTGATGTTA | | | |
| | CTAAGCTGATTTTGGT | | | |
| Nitab4.5_000 | TTTGCACTATTTGAACTACGTGAAAGGCGTGTACTCGAGGTGA | 504 | [A/G] | R |
| 0556\|805755 | CGAGTGT[A/G]TACACGGCCTTATATATGAAAATTTGACTGGT | | | |
| | TTAGACTCTTAGGTTTCT | | | |
| Nitab4.5_000 | GTTGTTATATTATATTGTTACGCTTTTGGTACATGTGGGATTGT | 505 | [G/A] | R |
| 0556\|806405 | TGAGAG[G/A]ATTGTCGGGGTATTTGCACGTGAGTTGTCTGT | | | |
| | GCTAAAGTTATTATTAAT | | | |
| Nitab4.5_000 | AGTTTTGGCCCAAAAATAAAATAATTTTTTTTCATTAGCTTATAG | 506 | [C/T] | Y |
| 0556\|808699 | TAACTT[C/T]ACAACTCCACTTCCTTCAACAACTCATGTGTCTA | | | |
| | GGCCCAAACATTGGAT | | | |
| Nitab4.5_000 | TATAAATGAACACCAAAGAACACCAAAAGAAAAAGAAGCAAC | 507 | [T/C] | Y |
| 0556\|809145 | CCATATCA[T/C]TAATCAAAACAAGATAAGAAGTGGACCTCAA | | | |
| | AAGTTGAATCTGAAAATTT | | | |
| Nitab4.5_000 | AATTTTTTATTATTAAACACAATTTATGTCGAGGTCGTACGACCC | 508 | [G/A] | R |
| 0556\|820786 | GATCCA[G/A]AATAATGTGTACACTACCAATGATCGAGCGGCA | | | |
| | CGAACCATAGATGCATC | | | |
| Nitab4.5_000 | GCCGAGGCATTCGGCCTACTCCACAAGAAGAGAAGGATATAT | 509 | [T/C] | Y |
| 0556\|820895 | TATAAGCA[T/C]TTGACTTAAACATTTTTTGAGGTTTTATACAAA | | | |
| | AGCAATACGAATTTCATT | | | |
| Nitab4.5_000 | ATCCCATTCCATAACTATTTTCGTGGTTAAAATCTCATTTTTTATC | 510 | [T/C] | Y |
| 0556\|821499 | AAAAA[T/C]CTAGGTTTTTCATCTTAACCCTTGATTTCCACAGTT | | | |
| | TACATGTTATAATC | | | |
| Nitab4.5_000 | GCGGCTGTCCATGCAGAGGTGCGGTTACACTAGAAGCTAGAA | 511 | [C/T] | Y |
| 0556\|822015 | GCTTCAAC[C/T]ATTGCTCCTAAGTCCAAACTTGGTCCGAGCCT | | | |
| | CGTCCGATTAACACCCGA | | | |
| Nitab4.5_000 | TGATTGGTAATGTGGGCACGAGATGCCAAGTGATTATAATTC | 512 | [G/A] | R |
| 0556\|822766 | GTGATTTG[G/A]GACTTGTGATTGTGATTATGAGGTGTGGTAC | | | |
| | CTCAGGGTGATTCTCGTGT | | | |
| Nitab4.5_000 | GTACAAGTTCTTATGTCTAGTAGGTGCCTCGACTGTACCTCGT | 513 | [C/T] | Y |
| 0556\|823091 | CACTACT[C/T]CACCGAAGTTAGTCTTGATACTTACTGGGTACC | | | |
| | GTTGTGGTGTACTCATG | | | |
| Nitab4.5_000 | TAGGCTTACCTAGTCTTAGAGATTAAGTGTAATCGCGACATCT | 514 | [G/A] | R |
| 0556\|823531 | TAAGGTA[G/A]AAATTTGGGATCGTGATAAGTTGGTATGTTGA | | | |
| | GAATGAACCCTTTCTATA | | | |
| Nitab4.5_000 | CGTCCACAAAACAATGTGAACTTAGGGAATCAATGTAATATTT | 515 | [T/C] | Y |
| 0556\|823836 | TTTTTGG[T/C]CATTGGGAATTCAATGTAATATATATGCATGCA | | | |
| | TCCACATATATAATTTG | | | |
| Nitab4.5_000 | CGAAGCTAATTTATTTATTATTTTTTATTTTTTATTTTAAAATCATT | 516 | [G/T] | K |
| 0556\|803248 | AGGTG[G/T]GGATTGGGGAAGTAAGATGATAATGTCTATATT | | | |
| | ATTCGAACTATTTTATT | | | |
| Nitab4.5_000 | GGACTCGAGATTAATTTTTTGGGGAATTATGTAAAGATCATAGC | 517 | [A/G] | R |
| 0556\|805520 | TTTATTT[A/G]TTGGAATTAATTTCTCTTGCATTATTTGATGTTA | | | |
| | CTAAGCTGATTTTGGT | | | |
| Nitab4.5_000 | TTTGCACTATTTGAACTACGTGAAAGGCGTGTACTCGAGGTGA | 518 | [A/G] | R |
| 0556\|805755 | CGAGTGT[A/G]TACACGGCCTTATATATGAAAATTTGACTGGT | | | |
| | TTAGACTCTTAGGTTTCT | | | |
| Nitab4.5_000 | NNNNNNNNNNNNNNNNNNNNNNNNNNNNNNNNNNGAG | 519 | [T/G] | K |
| 0556\|819811 | AGAGAGAGAGAGA[T/G]AGATATGCTCATCCAAAGTTTGATC | | | |
| | TTATGCGTACTCATTTAGAACTTTA | | | |
| Nitab4.5_000 | ATCCCATTCCATAACTATTTTCGTGGTTAAAATCTCATTTTTTATC | 520 | [T/C] | Y |
| 0556\|821499 | AAAAA[T/C]CTAGGTTTTTCATCTTAACCCTTGATTTCCACAGTT | | | |
| | TACATGTTATAATC | | | |
| Nitab4.5_000 | AAACGAGACAAATTTGCGTAGTATGGAGCTGGAAAAATTAAA | 521 | [C/T] | Y |
| 0556\|797881 | TTTGACGC[C/T]GATTCATATATATTACCCTAACAAATTTGAGA | | | |
| | TTTGGTCTAGTTGATTGA | | | |
| Nitab4.5_000 | TAAACTGGAACAAAGGAAGTATCAACTTTTTTGAGTCTGAGGA | 522 | [C/T] | Y |
| 0556\|798666 | AAAGTGGG[C/T]TGTAGGAAGCGCTCGCTTCTTAGGCAGAGC | | | |
| | ATGAAGCGATGAAGATGCGA | | | |
| Nitab4.5_000 | CGCTTTCAAAATCACTGGTGACAAGACAGCATTTCAGGGCTCT | 523 | [C/T] | Y |
| 0556\|799620 | ACAATAC[C/T]TTTACATACACTCATCTAACAACCTTGCAGCTT | | | |
| | AGGTTGTAGCAATGCTG | | | |
| Nitab4.5_000 | GGAGAAATACGCAAAAGGAATAAAAGCAACGTCAATTAAAAA | 524 | [T/C] | Y |
| 0556\|800382 | TACATATA[T/C]AAAGAAAATAGGAGAAAGCGAAGAGTACCT | | | |
| | CCTCAAAGAATTAGTTGAAT | | | |
| Nitab4.5_000 | GATGATCTACCACAACATGCCCAAAAGTGCGTCCGAGTACAGT | 525 | [C/G] | S |
| 0556\|802274 | TCTTAAT[C/G]GATATCAGCAATAAAAGCTAAAGGAACTAACG | | | |
| | CCCCAATGACATAAACTC | | | |
| Nitab4.5_000 | ATGTCGTACACTTGTCGTTTGGTACACATTGCAAATCGCGCCA | 526 | [C/T] | Y |
| 0556\|808321 | TGTGAAA[C/T]GCACGCGCCACGTGAAACGCACGCGCGATTT | | | |
| | ACAACATGTTTATTATTAT | | | |
| Nitab4.5_000 | ACACTTATTATCATATCCAATTAATATCCATCATATTAATAGTCC | 527 | [T/C] | Y |
| 0556\|819988 | TCGTC[T/C]ACATACAAAATAATATAATTAGCGCATATCAACTT | | | |
| | TCTTAATAGTGCTTA | | | |
| Nitab4.5_000 | AATTTTTTATTATTAAACACAATTTATGTCGAGGTCGTACGACCC | 528 | [G/A] | R |
| 0556\|820786 | GATCCA[G/A]AATAATGTGTACACTACCAATGATCGAGCGGCA | | | |
| | CGAACCATAGATGCATC | | | |
| Nitab4.5_000 | TTGCGGTTGTGATTGGTAATGTGGGCACGAGATGCCAAGTGA | 529 | [C/T] | Y |
| 0556\|822757 | TTATAATT[C/T]GTGATTTGRGACTTGTGATTGTGATTATGAGG | | | |
| | TGTGGTACCTCAGGGTGA | | | |
| Nitab4.5_000 | TGATTGGTAATGTGGGCACGAGATGCCAAGTGATTATAATTY | 530 | [G/A] | R |
| 0556\|822766 | GTGATTTG[G/A]GACTTGTGATTGTGATTATGAGGTGTGGTAC | | | |
| | CTCAGGGTGATTCTCGTGT | | | |
| Nitab4.5_000 | GTACAAGTTCTTATGTCTAGTAGGTGCCTCGACTGTACCTCGT | 531 | [C/T] | Y |
| 0556\|823091 | CACTACT[C/T]CACCGAAGTTAGTCTTGATACTTACTGGGTACC | | | |
| | GTTGTGGTGTACTCATG | | | |
| Nitab4.5_000 | CCTAGTCTTAGAGATTAAGTGTAATCGCGACATCTTAAGGTAG | 532 | [G/A] | R |
| 0556\|823539 | AAATTTG[G/A]GATCGTGATAAGTTGGTATGTTGAGAATGAAC | | | |
| | CCTTTCTATACTCTGTAT | | | |
| Nitab4.5_000 | CGTCCACAAAACAATGTGAACTTAGGGAATCAATGTAATATTT | 533 | [T/C] | Y |
| 0556\|823836 | TTTTTGG[T/C]CATTGGGAATTCAATGTAATATATATGCATGCA | | | |
| | TCCACATATATAATTTG | | | |

TABLE 7
SNPs associated with marker Nt2AG2015.

| | | SEQ | | |
|---|---|---|---|---|
| Landmark\|pos | Flanking sequence | ID No. | Variant | iupac |
| Nitab4.5_0002 | GACCGTTATATTATACTGGAATTCCAGTATATATTATTGAAG | 534 | [C/T] | Y |
| 539\|87422 | TATTTTTTC[C/T]GGATTTTGTATAGTGTTTTCGTTCAGATTTAT | | | |
| | CTTTACATGAAAAGTGGC | | | |
| Nitab4.5_0002 | AGCGCTGTCTTCTTACACATTAATTGTATTGTGTGTTTATTAC | 535 | [G/A] | R |
| 539\|89149 | TCCCTCC[G/A]TCTCATAGTACCTGTCATGATTCTCTTGTGCA | | | |
| | CGCCCCTTAAGAAAAATT | | | |
| Nitab4.5_0002 | AAACATGATAAAGTGTTTAAGAAAACTAGGTTGACTCATTG | 536 | [C/A] | M |
| 539\|89367 | GTATTTGAA[C/A]AAAGTTATTCATAATTGAGGTGTTTGTAG | | | |
| | TCTTTAAGGATAATTATTACC | | | |
| Nitab4.5_0002 | ACGTGGTTCTTATCCACACAAAAATGAATTTTCCCATTCGGT | 537 | [C/T] | Y |
| 539\|90547 | ATTCAATA[C/T]CGRTATTGAGACCCGATTAAATTTAGATTCA | | | |
| | TGCTAGAAAAGTCCCCCGT | | | |
| Nitab4.5_0002 | TGGTTCTTATCCACACAAAAATGAATTTTCCCATTCGGTATTC | 538 | [G/A] | R |
| 539\|90550 | AATAYCG[G/A]TATTGAGACCCGATTAAATTTAGATTCATGC | | | |
| | TAGAAAAGTCCCCCGTTGA | | | |
| Nitab4.5_0002 | CCCGATTAAATTTAGATTCATGCTAGAAAAGTCCCCCGTTGA | 539 | [A/G] | R |
| 539\|90609 | GAGGTAAA[A/G]TGGTCTCTCATAAAGACGAATTTATACTTA | | | |
| | GGGCTCGAATCCGAGACTTC | | | |
| Nitab4.5_0002 | CGCGAAATCCACAACAGACGATTGCCAAAATATGGCATACG | 540 | [C/T] | Y |
| 539\|94658 | TCCACCCTT[C/T]GCGAGCCCCATCGATTAAAGTCTGGAGTC | | | |
| | GCTGTTGCAGTGACTCTTGGT | | | |
| Nitab4.5_0002 | CCCTTTGTGGTTTGCAGGTTATTACACAGGGAAAGTTTACCC | 541 | [C/T] | Y |
| 539\|96112 | AGTACACA[C/T]AAAGTGCTCACCACAGAGTGCTCATCCGAA | | | |
| | GGGTAGAGGCTGTAGCAAAG | | | |
| Nitab4.5_0002 | TCTAATTTTCAAATATTATTTTCACTTAAAAAAAGATTTCACTT | 542 | [G/A] | R |
| 539\|99931 | TTTTTG[G/A]AATTTTACAATTCTTATGTCCAAGCGCCAACTA | | | |
| | TTTTTGTTCATTTAAAT | | | |
| Nitab4.5_0002 | ACTCATAAACATGTTTCACACCTTACACTACTAGAAGTTCGAT | 543 | [G/C] | S |
| 539\|101581 | AAAAATC[G/C]ACCGGAGCTAACCGGTCGATATTGTAATTTA | | | |
| | CATATGGATTCATTTSAAT | | | |
| Nitab4.5_0002 | ATCSACCGGAGCTAACCGGTCGATATTGTAATTTACATATGG | 544 | [G/C] | S |
| 539\|101628 | ATTCATTT[G/C]AATTTTGAACTAAAATCTATCAAAATTAGTG | | | |
| | AAAATATTGAGCTTTGAAC | | | |
| Nitab4.5_0002 | CCAACAACTGTCAGGCAGCTAACAGCTTGTTTGGATGGTTGT | 545 | [G/A] | R |
| 539\|104045 | TACTCATT[G/A]TATCGTATTGTATTGTATTGTATTGTTATCTC | | | |
| | AAAATAATGCTTGTTTTG | | | |
| Nitab4.5_0002 | CTAGACAACGTGCTCTTAGGCTGATGCTTTCTGAATTGTTTC | 546 | [A/G] | R |
| 539\|108145 | CAAGGAAT[A/G]CTTCTATCATATGTTCTGCCTTTCTTCCTCTT | | | |
| | TTTTCCTTTGCTTCTCCT | | | |
| Nitab4.5_0002 | AAATTTCAGCACACTTGGTTCAACACACTTGCTACTTCAGTCC | 547 | [T/C] | Y |
| 539\|108639 | CGTCTAA[T/C]AGAATGCTGAAGTTTTGTGTGATTGTCTTTGC | | | |
| | TACTTCAGCCCTGTATGC | | | |
| Nitab4.5_0002 | CCTGTATGCTGAAGTTACGCGAAAAAGTAGGTACGCTTGCA | 548 | [G/A] | R |
| 539\|108731 | ATTTTTTTT[G/A]CAAAGCGGGCACAAGTTAAAACGTGACTC | | | |
| | AAAAAGCGGATATAGATGCAA | | | |
| Nitab4.5_0002 | CATCATCTATGAGTGGGGTCCAGGGACGGACCATAAAAATC | 549 | [C/T] | Y |
| 539\|109433 | TACTGTATT[C/T]AATTTTATACTRTATTTCTGCAAAAGATTAT | | | |
| | TTTCACGGCAACAACCCGT | | | |
| Nitab4.5_0002 | GTGGGGTCCAGGGACGGACCATAAAAATCTACTGTATTYAA | 550 | [G/A] | R |
| 539\|109445 | TTTTATACT[G/A]TATTTCTGCAAAAGATTATTTTCACGGCAA | | | |
| | CAACCCGTGACCTCTTGGTC | | | |
| Nitab4.5_0002 | AAACATGATAAAGTGTTTAAGAAAACTAGGTTGACTCATTG | 551 | [C/A] | M |
| 539\|89367 | GTATTTGAA[C/A]AAAGTTATTCATAATTGAGGTGTTTGTAG | | | |
| | TCTTTAAGGATAATTATTACC | | | |
| Nitab4.5_0002 | TGGTTCTTATCCACACAAAAATGAATTTTCCCATTCGGTATTC | 552 | [G/A] | R |
| 539\|90550 | AATACCG[G/A]TATTGAGACCCGATTAAATTTAGATTCATGC | | | |
| | TAGAAAAGTCCCCCGTTGA | | | |
| Nitab4.5_0002 | CCCGATTAAATTTAGATTCATGCTAGAAAAGTCCCCCGTTGA | 553 | [A/G] | R |
| 539\|90609 | GAGGTAAA[A/G]TGGTCTCTCATAAAGACGAATTTATACTTA | | | |
| | GGGCTCGAATCCGAGACTTC | | | |
| Nitab4.5_0002 | GTATATAAAATTTGTATATTTTTTTTTGTATGTAACATATATAT | 554 | [A/T] | W |
| 539\|91027 | ATATATA[A/T]TAAAAATATAATTGTTTGCTATTATTTTGAGA | | | |
| | GCGGCTATACGGTGTCCT | | | |
| Nitab4.5_0002 | CGCGAAATCCACAACAGACGATTGCCAAAATATGGCATACG | 555 | [C/T] | Y |
| 539\|94658 | TCCACCCTT[C/T]GCGAGCCCCATCGATTAAAGTCTGGAGTC | | | |
| | GCTGTTGCAGTGACTCTTGGT | | | |
| Nitab4.5_0002 | GATCGATCGGATTTAGCATATTTCGGATTTCGGATTATAGAA | 556 | [T/C] | Y |
| 539\|95344 | AATGCAAT[T/C]CGAATTCGATCCTAAATATATCGGATCGGA | | | |
| | TCGGATTTTAAAGTTTGGAT | | | |
| Nitab4.5_0002 | ATCGACCGGAGCTAACCGGTCGATATTGTAATTTACATATGG | 557 | [G/C] | S |
| 539\|101628 | ATTCATTT[G/C]AATTTTGAACTAAAATCTATCAAAATTAGTG | | | |
| | AAAATATTGAGCTTTGAAC | | | |
| Nitab4.5_0002 | CCAACAACTGTCAGGCAGCTAACAGCTTGTTTGGATGGTTGT | 558 | [G/A] | R |
| 539\|104045 | TACTCATT[G/A]TATCGTATTGTATTGTATTGTATTGTTATCTC | | | |
| | AAAATAATGCTTGTTTTG | | | |
| Nitab4.5_0002 | CCTGTATGCTGAAGTTACGCGAAAAAGTAGGTACGCTTGCA | 559 | [G/A] | R |
| 539\|108731 | ATTTTTTTT[G/A]CAAAGCGGGCACAAGTTAAAACGTGACTC | | | |
| | AAAAAGCGGATATAGATGCAA | | | |
| Nitab4.5_0002 | GTGTTTTATTTTTTATCCATTTGTCTAAGCTTTTTTGGTAGACAT | 560 | [A/G] | R |
| 539\|87891 | AGTTACT[A/G]GATACCTGTGCGGGTTGAAAATAGCAGGTA | | | |
| | TTTGGTAAAATTAATTGAAG | | | |
| Nitab4.5_0002 | GTGTTATTTCATATGTACTAAATATTTTTTTAGGAGATTGAGTT | 561 | [A/G] | R |
| 539\|88735 | GAGGGTA[A/G]GGGTTGTTTTTTTTGGATTTTTTGTTTTCTCCC | | | |
| | ATTTTATTGGAGATGTTA | | | |
| Nitab4.5_0002 | ATATAAAATTTGTATATTTTTTTTTGTATGTAACATATATATAT | 562 | [A/T] | W |
| 539\|91029 | ATATAAT[A/T]AAAATATAATTRTTTGCTATTATTTTGAGAGC | | | |
| | GGCTATACGGTGTCCTTT | | | |
| Nitab4.5_0002 | TATATTTTTTTTTGTATGTAACATATATATATATATAATWAAAA | 563 | [G/A] | R |
| 539\|91041 | TATAATT[G/A]TTTGCTATTATTTTGAGAGCGGCTATACGGT | | | |
| | GTCCTTTTCCTTTAAAATT | | | |
| Nitab4.5_0002 | TGCACGGATCAGATCGATCGGATTTAGCATATTTCGGATTTC | 564 | [G/A] | R |
| 539\|95333 | GGATTATA[G/A]AAAATGCAATTCGAATTCGATCCTAAATAT | | | |
| | ATCGGATCGGATCGGATTTT | | | |
| Nitab4.5_0002 | CTTTGTAAAAGAGACAATACATTAAGAAAAATTCATGTTTAT | 565 | [G/A] | R |
| 539\|95503 | GCAATTAT[G/A]AGAGTACTATGGTGCCAATATAGCTAAATC | | | |
| | TAGCAATTGTAAAGGTAATA | | | |
| Nitab4.5_0002 | CAGACCGCCTAAGAGACTTTCCGACTGTCGAAGGAAGGAAG | 566 | [T/C] | Y |
| 539\|98944 | TTCAGTTTT[T/C]AGTGACCAGAAATTGACTAGTTTATTTAAT | | | |
| | TGACTTAAAGATCTTTCTTT | | | |
| Nitab4.5_0002 | AAAATTTGATACGAACTAAAAAGGAAATTGGTTCACTTAAAT | 567 | [G/T] | K |
| 539\|105559 | AAAATGAA[G/T]AGTTATTTTTTATTTGACCAGAATTGACGCG | | | |
| | GCCCTGCAACTGAACACGCG | | | |
| Nitab4.5_0002 | TCTAGAGCTAAAGTTCGTCAGTTACAAAAACAAAAACTTCAG | 568 | [A/G] | R |
| 539\|108521 | CAATTACA[A/G]ACAAAAATTTCAGCAAATAGAGAACAAAA | | | |
| | CTTCAGCTACTATGCTTAAGT | | | |
| Nitab4.5_0002 | GTGGGGTCCAGGGACGGACCATAAAAATCTACTGTATTCAA | 569 | [G/A] | R |
| 539\|109445 | TTTTATACT[G/A]TATTTCTGCAAAAGATTATTTTCACGGCAA | | | |
| | CAACCCGTGACCTCTTGGTC | | | |

[0642] In one embodiment provided herein are markers for use in identifying plants with low levels of nicotine.

[0643] SNPs or markers for use in genotyping the Nic1 and/or Nic2 locus are available in WO2018237107 which is incorporated herein by reference.

[0644] As used herein, “SNP” or “single nucleotide polymorphism” means a sequence variation that occurs when a single nucleotide (A, T, C or G) in the genome sequence is altered or variable with respect to a reference sequence. “SNP markers” exist when SNPs are mapped to sites on the genome.

[0645] As used herein, “marker” or “SNP marker” means a nucleic or amino acid sequence which is sufficiently unique to characterise a specific locus on the genome. A polymorphic trait can be used as a marker if it is inherited differentially and exhibits linkage disequilibrium with a phenotypic trait of interest. When a trait is stated to be linked to a given marker it will be understood that the actual DNA segment whose sequence affects the trait usually co-segregates with the marker.

[0646] Unless defined otherwise, all technical and scientific terms used herein have the same meaning as commonly understood by one of ordinary skill in the art to which this disclosure belongs. Singleton, et al., DICTIONARY OF MICROBIOLOGY AND MOLECULAR BIOLOGY, 20 ED., John Wiley and Sons, New York (1994), and Hale & Marham, THE HARPER COLLINS DICTIONARY OF BIOLOGY, Harper Perennial, NY (1991) provide one of skill with a general dictionary of many of the terms used in this disclosure.

[0647] This disclosure is not limited by the exemplary methods and materials disclosed herein, and any methods and materials similar or equivalent to those described herein can be used in the practice or testing of embodiments of this disclosure. Numeric ranges are inclusive of the numbers defining the range. Unless otherwise indicated, any nucleic acid sequences are written left to right in 5′ to 3′ orientation; amino acid sequences are written left to right in amino to carboxy orientation, respectively.

[0648] The headings provided herein are not limitations of the various aspects or embodiments of this disclosure which can be had by reference to the specification as a whole. Accordingly, the terms defined immediately below are more fully defined by reference to the specification as a whole.

[0649] Amino acids are referred to herein using the name of the amino acid, the three letter abbreviation or the single letter abbreviation. The term “protein”, as used herein, includes proteins, polypeptides, and peptides. As used herein, the term “amino acid sequence” is synonymous with the term “polypeptide” and/or the term “protein”. In some instances, the term “amino acid sequence” is synonymous with the term “peptide”. In some instances, the term “amino acid sequence” is synonymous with the term “enzyme”.

[0650] In the present disclosure and claims, the conventional one-letter and three-letter codes for amino acid residues may be used. The 3-letter code for amino acids as defined in conformity with the IUPACIUB Joint Commission on Biochemical Nomenclature (JCBN). It is also understood that a polypeptide may be coded for by more than one nucleotide sequence due to the degeneracy of the genetic code.

[0651] Other definitions of terms may appear throughout the specification. Before the exemplary embodiments are described in more detail, it is to understand that this disclosure is not limited to particular embodiments described, as such may, of course, vary. It is also to be understood that the terminology used herein is for the purpose of describing particular embodiments only, and is not intended to be limiting, since the scope of the present disclosure will be limited only by the appended claims.

[0652] The various embodiments described herein are presented only to assist in understanding and teaching the claimed features. These embodiments are provided as a representative sample of embodiments only, and are not exhaustive and/or exclusive. It is to be understood that advantages, embodiments, examples, functions, features, structures, and/or other aspects described herein are not to be considered limitations on the scope of the invention as defined by the claims or limitations on equivalents to the claims, and that other embodiments may be utilised and modifications may be made without departing from the scope of the claimed invention. Various embodiments of the invention may suitably comprise, consist of, or consist essentially of, appropriate combinations of the disclosed elements, components, features, parts, steps, means, etc. other than those specifically described herein. In addition, this disclosure may include other inventions not presently claimed, but which may be claimed in future.

[0653] Where a range of values is provided, it is understood that each intervening value, to the tenth of the unit of the lower limit unless the context clearly dictates otherwise, between the upper and lower limits of that range is also specifically disclosed. Each smaller range between any stated value or intervening value in a stated range and any other stated or intervening value in that stated range is encompassed within this disclosure. The upper and lower limits of these smaller ranges may independently be included or excluded in the range, and each range where either, neither or both limits are included in the smaller ranges is also encompassed within this disclosure, subject to any specifically excluded limit in the stated range. Where the stated range includes one or both of the limits, ranges excluding either or both of those included limits are also included in this disclosure.

[0654] It must be noted that as used herein and in the appended claims, the singular forms “a”, “an”, and “the” include plural referents unless the context clearly dictates otherwise. Thus, for example, reference to “an enzyme” or “a nitrate reductase” includes a plurality of such candidate agents and equivalents thereof known to those skilled in the art, and so forth.

### Advantages

[0655] It has been surprisingly found that by modulating the activity or expression of a Nic3 gene as taught herein, for example by providing a mutation in a Nic3 locus, the alkaloid content (e.g. nicotine content) and/or TSNA precursor content of tobacco cells and tobacco plants or parts thereof can be modulated. Thereby delivery systems with modulated alkaloid (e.g. reduced nicotine) and/or reduced TSNA precursor content and commercially desirable traits sought after by consumers of delivery systems can be produced. In particular, tobacco cells and tobacco plants or parts thereof having reduced nicotine content may be produced by providing at least one mutation in a Nic3 locus, and optionally at least one mutation in a Nic1 locus and/or at least one mutation in a Nic2 locus.

[0656] The present inventors have for the first time identified a new locus which is capable of producing an ultra low nicotine phenotype. Prior to the present invention, it had not been known that modulation of the activity or expression of a Nic3 gene as described herein could be used to modulate alkaloid and/or TSNA content.

[0657] The present inventors have determined that the modulation of a new locus, referred to herein as the Nic3 locus can reduce the alkaloid content (e.g. nicotine content) of the modified plant to a surprisingly low level. In particular the present inventors have determined that the alkaloid content (e.g. nicotine content) may be reduced to a surprisingly low level by providing at least one mutation in a Nic3 locus, and optionally at least one mutation in a Nic1 locus and/or at least one mutation in a Nic2 locus.

[0658] The publications discussed herein are provided solely for their disclosure prior to the filing date of the present application. Nothing herein is to be construed as an admission that such publications constitute prior art to the claims appended hereto.

### EXAMPLES

### Example 1—Development of a Population Segregating for Nic3

[0659] A flue-cured tobacco variety (FC101) containing nic1 and nic2, was found to have lower than expected nicotine levels, based on these two loci alone.

[0660] It was hypothesized by the present inventors that a third locus, Nic3, was controlling the reduced nicotine levels in this variety. Here we present the work on identifying the underlying gene(s) controlling this locus.

[0661] Plant Materials

[0662] In order to develop a population segregating for Nic3, an F₂ population of 262 individuals was generated from a cross between FC101 (nic1 nic2 nic3) and LAFC53 (nic1 nic2 Nic3).

[0663] All individuals, along with five replicates of the two parents were seeded in the greenhouse and then transplanted into field in Kernersville, N.C. during the normal USA growing season. Plants were grown until 140 days post-transplant before harvesting. Lower, middle and upper stalk leaf positions were harvested as they became mature. Upper leaves (the top 5-7 leaves) were then cured in a six-rack flue curing barn as per standard flue-curing practices.

### Example 2—Phenotyping of Parents and F₂s Derived from the Cross Between FC101 (Nic1 Nic2 Nic3) and LAFC53 (Nic1 Nic2 Nic3)

[0664] Nicotine and nornicotine were measured in three technical replicates for both of the parents, as well as 218 individuals from the F2 population.

[0665] Alkaloids we measured via standard gas chromatographic methods.

[0666] Results

[0667] Nicotine and nornicotine content analysis of the two parents showed that FC101 contained significantly lower levels of both alkaloids compared to LAFC53 (FIG. 1).

[0668] Nicotine levels for the F₂ plants derived from FC101×LAFC53 were found to be continuously distributed (FIG. 2A), so the genotype of Nic3 could not be unambiguously inferred based on the phenotype value.

[0669] Nornicotine content in the F₂s was found to be largely uniform, with a few individuals exhibiting spontaneously high levels of nornicotine (FIG. 2B).

### Example 3—Marker Development and Linkage Analysis

[0670] DNA was extracted from leaf samples of all F₂ lines and their respective parents using the CTAB method. All F₂ lines and the parental DNA samples were selected for SNP genotyping with a custom tobacco 50K Infinium iSelect HD BeadChip (Illumina Inc., San Diego, Calif.). SNP clusters were generated using GenomeStudio version 2.0 (IIlumina Inc., San Diego, Calif.) and all polymorphic markers identified were used for further analysis. A genetic linkage map for the population was constructed using the software Joinmap version 4.0 (Stam, 1993) using the regression mapping function, with default settings.

[0671] In order to rough map the nic3 locus, multiple QTL mapping was carried out on the two populations using the stepwiseqtI function of R/QTL (Broman & Sen, 2009; Manichaikul et al. 2009), using the Haley-Knott regression method, with genotype probabilities calculated at a maximum distance of 1 cM and 1000 permutations to determine logarithm of the odds (LOD) significant thresholds for incorporating both additive QTL and epistatic interactions at an experiment-wise α=0.01.

[0672] Results

[0673] iSelect HD BeadChip Genotyping of the F₂ Individuals Derived from FC101×LAFC53

[0674] To identify the Nic3 locus via QTL analysis, we then genotyped the F₂ individuals with a custom 50K Infinium iSelect HD BeadChip. Using the iSelect HD BeadChip, we identified approximately 4,400 SNP markers that were polymorphic between FC101 and LAFC53.

[0675] These markers were able to be mapped to 2992 unique loci in the F2 population.

[0676] QTL analysis of the F₂ population identified a linkage group containing a number of markers that was significantly associated with total nicotine content (maximum LOD score of 22.17), explaining 37.4% of the variance in this trait (FIG. 3).

[0677] These markers co-located with markers on linkage group 5 of the N. tabacum 30k Infinium HD consensus map 2015 (pseudo-chromosome 5 of the Edwards et al. (2017) genome).

[0678] Results

[0679] Using the markers identified as being closely linked to the peak of the QTL for nicotine content, we identified a genomic region encompassing the Nic3 locus subtended by the markers Nt1AG1750 (SEQ ID No. 311) and Nt1AC2307 (SEQ ID No. 312) (206 cM to 398 cM in FIG. 3).

[0680] Utilizing the BioNano hybrid assembly of Edwards et al. (2017), we were able to identify scaffolds mapped to the pseudo-chromosomes that covered a large part of this region. Markers that were not able to be placed on the pseudo-chromosomes, but were able to be uniquely mapped to a scaffold in the Edwards et al. (2017) genome, were integrated based on their position on the genetic map. We then utilized RNA-seq information from Edwards et al. (2017) in order to improve the gene models for genes within this identified region.

[0681] Candidate genes were then chosen based on predicted functions.

[0682] A MYC transcription factor (Nitab4.5_0002539 g0040.1) was identified that contained SNPs in its coding region (marker ID Nt2AG2015) that resulted in an amino acid change (K87E, wherein K is the wild-type) and G84V. F₂ individuals classified as containing FC101 or LAFC53 alleles at this marker exhibited a clear segregation for the nicotine and nornicotine content (FIG. 4), indicating that this alteration may be causal for the low nicotine phenotype.

### Example 4—Physical Mapping and Candidate Gene Identification

[0683] SNP markers found to be closely genetically linked to the Nic3 locus were identified by using the Iodint function of R/QTL (Broman & Sen, 2009), using a LOD drop of 1.5 to define the region. Markers within the region of interest surrounding the Nic3 locus that were able to be uniquely anchored to an improved tobacco genome assembly (Edwards et al., 2017) were used to identify BioNano hybrid scaffolds (i.e. pseudo-chromosome regions) subtending the region and therefore identify the chromosome on which Nic3 resides. Gaps in pseudo-chromosome sequences were filled by markers that were able to be uniquely mapped to the genome scaffolds, but were not present on the BioNano hybrid scaffold, based on their relative locations in the genetic map.

[0684] Gene model candidates in the updated region were then compared against RNA-seq data (Edwards et al., 2017) and amended if necessary.

### Example 5—Identification of Candidate Gene

[0685] To identify the gene(s) within the Nic3 locus responsible for the nicotine modulation observed in FC101, each gene is silenced individually in a low nicotine background (i.e. nic1nic2 background) by virus-induced gene silencing (VIGS), for example as described in WO2020/025963 and the alkaloid content is measured.

### Example 6—Modulation of Activity of Candidate Gene

[0686] To confirm that amino acids of interest are required for the protein function, two approaches are used:
[0687] 1. Gene editing to mutate the residues of interest (e.g. G84V and/or K87E for MYC2) in a low nicotine background (i.e. nic1nic2 background)
[0688] 2. Overexpression of the unmutated gene as well as gene edited variants (e.g. full-length MYC2, MYC2 G84V, MYC2 K87E and MYC2 G84V K87E)

[0689] Functional Domain:

[0690] In order to correlate the ultra-low nicotine phenotype with the function of our gene of interest, two approaches are used:
[0691] 1. Gene editing to delete the functional domain (e.g. DNA-binding site for MYC2)
[0692] 2. Overexpression of the full-length protein as well as the version comprising a deletion in the functional domain (e.g. full-length MYC2 and MYC2deltaDNA-binding domain) Alkaloid content is measured.

### Example 7—Virus-Induced Gene Silencing of Genes in the Nic3 Locus

[0693] A TRV vector comprising both (TRV RNA1, SEQ ID No. 570) and (TRV RNA2, selected from SEQ ID Nos. 571-574) comprising the targeted nucleotide sequence (from SEQ ID NOs: 73 (Nitab4.5_0002539 g0040.2), 118 (Nitab4.5_0002683 g0080.2), 124 (Nitab4.5_0005412 g0010.2) and 127 (Nitab4.5_0005412 g0020.2) were separately propagated in A. tumefaciens. These cultures were mixed (1:1) and syringe-infiltration into 2-week-old LaBY21 plants which have a nic1nic2 background (carrying ERF199 and ERF189 mutations in Nic1 and Nic2 genes, respectively, as disclosed in WO2018/237107). The silencing effect was assessed five weeks post-virus infection by assessing the expression level of the target gene (data not shown).

[0694] The TRV RNA2 sequences are shown in FIGS. 5-8 in which the gene-specific sequences are shown in bold and underlined.

[0695] Results

[0696] The nicotine content of 6-week-old LaBY21 (nic1nic2) leaves expressing silencing constructs for the indicated genes are shown in FIG. 9. Content is represented relative to control and comprises three biological replicates analysed by One way ANOVA. Values are shown as means±SEM. Asterisks indicate statistical significance of P value≤0.001

[0697] Silencing of genes in the Nic3 locus lead to a decrease in nicotine content as compared to nic1 nic2.

[0698] All publications mentioned in the above specification are herein incorporated by reference. Various modifications and variations of the described methods and system of the present invention will be apparent to those skilled in the art without departing from the scope and spirit of the present invention. Although the present invention has been described in connection with specific preferred embodiments, it should be understood that the invention as claimed should not be unduly limited to such specific embodiments. Indeed, various modifications of the described modes for carrying out the invention which are obvious to those skilled in biochemistry and biotechnology or related fields are intended to be within the scope of the following claims.

### REFERENCES

[0699] Adams, A. C., De Godoy Lusso, M. S., Pramod, S., and Xu, D. (2016). Compositions and Methods for Producing Tobacco Plants and Products Having Altered Alkaloid Levels. US patent application 20160374387A1.
[0700] Bindler, G., Plieske, J., Bakaher, N., Gunduz, I., Ivanov, N., Hoeven, R., Ganal, M., and Donini, P. (2011). A high density genetic map of tobacco (Nicotiana tabacum L.) obtained from large scale microsatellite marker development. Theoretical and Applied Genetics 123, 219-230.
[0701] Collins, G. B., Legg, P. D., and Kasperba. M j (1974). Use of Anther-Derived Haploids in Nicotiana 0.1. Isolation of breeding lines differing in total alkaloid content. Crop Science 14, 77-80.
[0702] Chakrabarty, R., Banerjee, R., Chung, S. M., Farman, M., Citovsky, V., Hogenhout, S. A., Tzfira, T., and Goodin, M. (2007). PSITE vectors for stable integration or transient expression of autofluorescent protein fusions in plants: probing Nicotiana benthamiana-virus interactions. Molecular Plant-Microbe Interactions 20, 740-50.
[0703] Edwards, K. D., Fernandez-Pozo, N., Drake-Stowe, K., Humphry M., Evans, A. D., Bombarely, A., Allen, F., Hurst, R., White, B., Kernodle, S. P., Bromley, J. R., Sanchez-Tamburrino, J. P., Lewis, R. S., and Mueller, L. A. (2017) A reference genome for Nicotiana tabacum enables map-based cloning of homologous loci implicated in nitrogen utilization efficiency. BMC Genomics 18, 448.
[0704] Hibi, N., Higashiguchi, S., Hashimoto, T., and Yamada, Y. (1994). Gene-Expression in Tobacco Low-Nicotine Mutants. Plant Cell 6, 723-735.
[0705] Horsch, R. B., Fry, J. E., Hoffmann, N. L., Eichholtz, D., Rogers, S. G., and Fraley, R. T. (1985). A simple and general method for transferring genes into plants. Science 227, 1229-1231.
[0706] Kajikawa, M., Sierro, N., Kawaguchi, H., Bakaher, N., Ivanov, N. I., Hashimoto, T., and Shoji, T. (2017). Genomic insights into the evolution of the nicotine biosynthesis pathway in tobacco. Plant Physiology 174, 999-1011.
[0707] Kidd, S. K., Melillo, A. A., Lu, R. H., Reed, D. G., Kuno, N., Uchida, K., Furuya, M., and Jelesko, J. G. (2006). The A and B loci in tobacco regulate a network of stress response genes, few of which are associated with nicotine biosynthesis. Plant Mol Biol 60, 699-716.
[0708] Langmead, B., and Salzberg, S. L. (2012). Fast gapped-read alignment with Bowtie 2. Nat Methods 9, 357-9.
[0709] Legg P, Chaplin J, Collins G. (1969). Inheritance of percent total alkaloids in Nicotiana tabacum L.: populations derived from crosses of low alkaloid lines with burley and flue-cured varieties. Journal of Heredity 60: 213-217.
[0710] Legg P., and G., C. (1971). Inheritance of percent total alkaloids in Nicotiana tabacum L. II. genetic effects of two loci in Burley21×LA Burley 21 populations. Canadian Journal of Genetics and Cytology 13, 287-291.
[0711] Legg P D, Collins G B, Litton C C. 1970. Registration of La Burley-21 Tobacco Germplasm. Crop Science 10(2): 212.
[0712] McKenna, A., Hanna, M., Banks, E., Sivachenko, A., Cibulskis, K., Kernytsky, A., Garimella, K., Altshuler, D., Gabriel, S., Daly, M., and DePristo, M. A. (2010). The Genome Analysis Toolkit: a MapReduce framework for analyzing next-generation DNA sequencing data. Genome Research 20, 1297-303.
[0713] Neff, M. M., Turk, E., and Kalishman, M. (2002). Web-based primer design for single nucleotide polymorphism analysis. Trends in Genetics 18, 613-5.
[0714] Nielsen, M. T., Legg, P. D., and Collins, G. B. (1988). Registration of HI and LI burley 21 tobacco germplasms. Crop Science 28, 206-207.
[0715] Qin, Q., Li, D., Dai, X., Zhao, P., Miller, R., Jack, A., and Yang, S. (2015) Development of user-friendly marker for Nic2 in tobacco. SRC, Tobacco Science Research Conference, 69, abstract 79.
[0716] Reed, D. G., and Jelesko, J. G. (2004). The A and B loci of Nicotiana tabacum have non-equivalent effects on the mRNA levels of four alkaloid biosynthetic genes. Plant Science 167 1123-1130.
[0717] Rigola, D., van Oeveren, J., Janssen, A., Bonné, A., Schneiders, H., van der Poel, H. J. A., van Orsouw, N. J., Hogers, R. C. J., de Both, M. T. J., and van Eijk, M. J. T. (2009) High-Throughput Detection of Induced Mutations and Natural Variation Using KeyPoint™ Technology. PLOS ONE 4, e4761. https://doi.org/10.1371/journal.pone.0004761.
[0718] Rushton P J, Bokowiec M T, Han S C, Zhang H B, Brannock J F, Chen X F, Laudeman T W, Timko M P. 2008. Tobacco transcription factors: Novel insights into transcriptional regulation in the Solanaceae. Plant Physiology 147: 280-295.
[0719] Sahoo, D. K., Dey, N., and Maiti, I. B. (2014). pSiM24 is a novel versatile gene expression vector for transient assays as well as stable expression of foreign genes in plants. PLoS One 9, e98988. Shoji, T., Kajikawa, M., and Hashimoto, T. (2010). Clustered transcription factor genes regulate nicotine biosynthesis in tobacco. The Plant Cell 22,3390-3409.
[0720] Sierro, N., Battey, J. N., Ouadi, S., Bakaher, N., Bovet, L., Willig, A., Goepfert, S., Peitsch, M. C., and Ivanov, N. V. (2014). The tobacco genome sequence and its comparison with those of tomato and potato. Nature Communications 5, 3833.
[0721] Stam, P. (1993). Construction of integrated genetic linkage maps by means of a new computer package—Joinmap. Plant Journal 3, 739-744.
[0722] Valleau W. 1949. Breeding low-nicotine tobacco. Journal of Agricultural Research 78: 171-181. Van Ooijen J. W. (2009). MapQTL 6: Software for the mapping of quantitative trait loci in experimental populations of diploid species. Wageningen (The Netherlands): Kyazma B V.
[0723] Voelckel, C., Krugel, T., Gase, K., Heidrich, N., van Dam, N. M., Winz, R., and Baldwin, I. T. (2001). Anti-sense expression of putrescine N-methyltransferase confirms defensive role of nicotine in Nicotiana sylvestris against Manduca sexta. Chemoecology 11, 121-126.
[0724] Zhu, B., Cai, G., Hall, E. O., and Freeman, G. J. (2007). In-fusion assembly: seamless engineering of multidomain fusion proteins, modular vectors, and mutations. Biotechniques 43, 354-9.

The application's sequence listing, which the Patent Office published only in electronic form, follows.

SEQUENCE LISTING (574 sequences)

SEQ ID NO: 1 - DNA, 1697 bp, Nicotiana tabacum
atgggggacgtttgcggcagagatataagagatccgaataggagaggcgcgagactgtggctaggaacttatgagactccggaggatgcagcattagcttatgaccaagccgcttttgagatccgcggctcgaaagcacggctcaattttccgcacttaattggctcgaacatgactaagccggctagggttacagcgaggtttcgtatgcgctcaccggagccatcgtcttcagcttcttcagaaaatacgacaaggaaaatgaagatagatgtgataaactccatagctaaagtaaaatttattcgtcatagcttgattaatctacaaatgttggtataattgtgaggaagtaaggtttcttcgtgtttaacaattgcaatataaattatggaggcggtttcaggattttaattttatgggttcaaatttctaattctaccgctttcatctaattaactaggttcaaagtctattatttttgcacatttagtgaatcttttaaaacatatacatagtctatgccaaaatttagggaggttcaaaaccaaaccttaaccaaaaattgaaccacaaaattggcttaatgtcttatttgtatcgggttatcatattaactgttggtgagtggattgaaattttataattaacgatttattggttttgaggcgaattattcaattttcttaacggataaaccgttaacccgttaagaatttttatatttgtattttttacccttatgtatattaaatatccttccactatttaacaaacactacaagaaatatgtgatacggcgacatttaattagtgacaattaagataaatgtccgaaaaaagttaatttagtgacatttgttagaaaatgtgataagaataccgacatttgttgaaaacatgtcaaaaatattttgacatttgatttaaatgtcatattattaggaatataacaacatttaattagtaacatttataacaaatgttaaaaataattttttcgcccaacaagaaaaaataactttaagcactttatgggcctttaaacttctcttctttttacagaaatacaagaaagttaaaaataacattcaacccgattcctccacaactcttcaagccgcaaccatctccgtatctttcactcattttgatccaaatccgccggtaagatttttcttcatataagtgctataaatcacaatcttctgtattatatttcttgtctgcttttgactgtttgttgatagccctaaatttgccgtctatagtcttgagatttcttttgattgaaccttttgattcgtttcagacctagaagggccgcctgccagaattaaatttcagcaattatcgctctcagaatctggagttgcaatcagattcatccactctaactcgtgttctgtacgtttggacttttctttttgagtgaaatgagatttgtgatattttggtttctgaaattcttgaacttttttctttcttgttgtttatttttgttttctttttgaaggtgaatttcctgcaaaagagtctagtaacgttgatattactccatatgaggttaaaatgtaattttgctacttaccttttcccttaatcactttggtgataatttttttttaaaaaaattcagatcttggatacatcagattttgaaggttgtgagatcaattaatgtgaaggaatcctga

SEQ ID NO: 2 - DNA, 591 bp, Nicotiana tabacum
atgggggacgtttgcggcagagatataagagatccgaataggagaggcgcgagactgtggctaggaacttatgagactccggaggatgcagcattagcttatgaccaagccgcttttgagatccgcggctcgaaagcacggctcaattttccgcacttaattggctcgaacatgactaagccggctagggttacagcgaggtttcgtatgcgctcaccggagccatcgtcttcagcttcttcagaaaatacgacaaggaaaatgaagatagatgtgataaactccatagctaaaaaatacaagaaagttaaaaataacattcaacccgattcctccacaactcttcaagccgcaaccatctccgtatctttcactcattttgatccaaatccgccgggccgcctgccagaattaaatttcagcaattatcgctctcagaatctggagttgcaatcagattcatccactctaactcgtgaatttcctgcaaaagagtctagtaacgttgatattactccatatgaggttaaaatatcttggatacatcagattttgaaggttgtgagatcaattaatgtgaaggaatcctga

SEQ ID NO: 3 - DNA, 591 bp, Nicotiana tabacum; identical to SEQ ID NO: 2

SEQ ID NO: 4 - protein, 196 aa, Nicotiana tabacum
MGDVCGRDIRDPNRRGARLWLGTYETPEDAALAYDQAAFEIRGSKARLNFPHLIGSNMTKPARVTARFRMRSPEPSSSASSENTTRKMKIDVINSIAKKYKKVKNNIQPDSSTTLQAATISVSFTHFDPNPPGRLPELNFSNYRSQNLELQSDSSTLTREFPAKESSNVDITPYEVKISWIHQILKVVRSINVKES

SEQ ID NO: 5 - DNA, 720 bp, Nicotiana tabacum
atggcaatggaaatgaatccagctgacgaaaccttgtttttctccgactctcatctccttgaatcgataaagcaacatcttcttgacgattcagatttttctgaaattttttcgtcgatgaattctagcaacgaaatattgcctaacagtcctagctcaagttttagcagcttcgacttcgactgcagcttccttaattgggatgaaaactctgaggaaacattaataccaactgatcagaatccttcacatgaatcccatgaaaagtactccgagtccgaggagaaaacccagggccctggggtggcgcgtgagaaaaacgcgccgcgagattggacgcggtacataggagtgaaacggcgaccgtgggggacgttttcggcggagacaagagacccaagtaggaaaggtgaaggtgcaaggctgtggttaggaacttacgagaccgcagaggatgcagcgttagcttacgatcaagccgctttcaaaatccgcggctcgagagctcggctcaattttcctcacttaatcggctcaaacatgcctaagccggctagagttacagcgaggcgtagtcgtacgcgctcacccgagccatcgtcttcttcatccacctcatcatcagaaaatgtaccaaggaaaaggaatatagatgtgataaattccatagccaaagccaaattcctttgtcatagcttgaatttacagagattagcttaa

SEQ ID NO: 6 - DNA, 720 bp, Nicotiana tabacum; identical to SEQ ID NO: 5

SEQ ID NO: 7 - DNA, 720 bp, Nicotiana tabacum; identical to SEQ ID NO: 5

SEQ ID NO: 8 - protein, 239 aa, Nicotiana tabacum
MAMEMNPADETLFFSDSHLLESIKQHLLDDSDFSEIFSSMNSSNEILPNSPSSSFSSFDFDCSFLNWDENSEETLIPTDQNPSHESHEKYSESEEKTQGPGVAREKNAPRDWTRYIGVKRRPWGTFSAETRDPSRKGEGARLWLGTYETAEDAALAYDQAAFKIRGSRARLNFPHLIGSNMPKPARVTARRSRTRSPEPSSSSSTSSSENVPRKRNIDVINSIAKAKFLCHSLNLQRLA

SEQ ID NO: 9 - DNA, 666 bp, Nicotiana tabacum
atgcagggaatatcattagagtttgatcagcaaaattttcttgacaccatgcagcatctcttcaatgatcccgactttccccaaatcttttcagaactaaactcattcaataacaccatccaaacacctagaaacccaggttcagagaacaccatatttgcacaaaacatggttcaacgcaatcaagaaaaatatgcagatgatcatatcgtcccattgcaaaagacttcgtcagaaaatgataaggagccatcttcagatcaggtgcctttggaaaagaagaaatacaaaggagttaggagaaggccatggggaaaatatgctgcagaaataagggatcctgaaagaaaaggcgctagactttggctagggacatatgaaactcctgaggatgcagcattggcttatgacagaactgcatttaaactgcgcggttcaagagctgtactcaatttccctcacttgattgaatctaatgttactgaaattaacagagtgaggccaaggagacgttcacgttcaccggatattgagctttcatctgatcagcatgatggtccgatttcaaagaggagaaatgttgacctaattaacagcttagctacagccaacttggatagccaaattatcgtggagagatgtttaacgtctagtttttttgcctga

SEQ ID NO: 10 - DNA, 666 bp, Nicotiana tabacum; identical to SEQ ID NO: 9

SEQ ID NO: 11 - DNA, 666 bp, Nicotiana tabacum; identical to SEQ ID NO: 9

SEQ ID NO: 12 - protein, 221 aa, Nicotiana tabacum
MQGISLEFDQQNFLDTMQHLFNDPDFPQIFSELNSFNNTIQTPRNPGSENTIFAQNMVQRNQEKYADDHIVPLQKTSSENDKEPSSDQVPLEKKKYKGVRRRPWGKYAAEIRDPERKGARLWLGTYETPEDAALAYDRTAFKLRGSRAVLNFPHLIESNVTEINRVRPRRRSRSPDIELSSDQHDGPISKRRNVDLINSLATANLDSQIIVERCLTSSFFA

SEQ ID NO: 13 - DNA, 564 bp, Nicotiana tabacum
atgaattcagctgatctttccctccttgaatccatacagcatcatcttctaaatgattctaatattccagaaatcttttcagctatggattccaatagccctagttcaagttttagcaactctccttctacagaaaacaacttttactatggtgaattaacaccattgataaaccctactttagtaggcgccactgaaaagtctcatgaatttgaagagactaataataaggagactgtggcggcgaaggtggcaaacgcgccacaagattggaagcggtacagaggcgtaaggcggcggccttggggcaagttcgcggcggagataagggatccgaataagaaaaatgcaagattatggttaggaacatatgagacaccggaggatgcagcattggcttatgatcaagccgctttcaaaattcgtggctcgaaagcacggctcaattttcctcacttagtcggctcaggcatgccggagccggctagagtgaaccctaggcgtcgctcgcactcgccggagtcgtcatctgaaaacggaacaccaagaaaactatttgtgtaa

SEQ ID NO: 14 - DNA, 564 bp, Nicotiana tabacum; identical to SEQ ID NO: 13

SEQ ID NO: 15 - DNA, 564 bp, Nicotiana tabacum; identical to SEQ ID NO: 13

SEQ ID NO: 16 - protein, 187 aa, Nicotiana tabacum
MNSADLSLLESIQHHLLNDSNIPEIFSAMDSNSPSSSFSNSPSTENNFYYGELTPLINPTLVGATEKSHEFEETNNKETVAAKVANAPQDWKRYRGVRRRPWGKFAAEIRDPNKKNARLWLGTYETPEDAALAYDQAAFKIRGSKARLNFPHLVGSGMPEPARVNPRRRSHSPESSSENGTPRKLFV

SEQ ID NO: 17 - DNA, 435 bp, Nicotiana tabacum
atgttaactagtgtcaataccacgtggcaacgagtcgataatttggagtacaaggaggaaacaaagaagaaccatgtggtggcgcgtggtgtgcacgcacctcaggattggaaccggtacagaggtgttaggcggaggccgtggggtaaatttgcggcggagataagaaaccctgataggaaaggcgccaggctttggctaggaacttacgagacacccgaagatgcagcattggcttatgaccaagccgcttataagatccgtggctctaaggctcggctcaacttccctcacttaatcggctcgaacatatccgagccggttagagtggctccgaggcggcgttgcctttcgccggagatttcatcatcttctttttcgttgtcatttgtaaaaaatgtacctctaaagaagagaaaattggctgaaaattga

SEQ ID NO: 18 - DNA, 435 bp, Nicotiana tabacum; identical to SEQ ID NO: 17

SEQ ID NO: 19 - DNA, 435 bp, Nicotiana tabacum; identical to SEQ ID NO: 17

SEQ ID NO: 20 - protein, 144 aa, Nicotiana tabacum
MLTSVNTTWQRVDNLEYKEETKKNHVVARGVHAPQDWNRYRGVRRRPWGKFAAEIRNPDRKGARLWLGTYETPEDAALAYDQAAYKIRGSKARLNFPHLIGSNISEPVRVAPRRRCLSPEISSSSFSLSFVKNVPLKKRKLAEN

SEQ ID NO: 21 - DNA, 684 bp, Nicotiana tabacum
atgaacccagctaatgcaaccttctctttctctgagtttgatttccttgaatcaatagaaaaccatcttctcaactatgattccgatttttctggatttttttcgacgatgagttcaagtaacgcattgcctaatagtcctagctcaagttttggcagctccccttctgcagaaagtagcttggatacctctctttgggatgaaaactttgaggaaataataccacatctcgaagagaagtccgagtccgaggaggaaacaaaggggcatgtagtggcgcgtgagaaaaacgcgacgcaagattggagacggtacataggagttaaacggcggccatgggggacgttttcggcggagataagggacccggagagaagaggcgcgagattatggctaggaacttatgagaccccagaggatgcagcattggcgtatgatcaagccgctttcaaaatccgcggctcgagagctcggctcaattttcctcacttaattggatctaacatgcctaagccggctagagtaacagcgcggcgtagccgtaggcgctcacccgagccatcgtcttcttcatgcacctcatcatcagaaaatgggacaagaaaaaggaaaatagatgtgataaattccatagccaaagccaaattggtttgtcatggatggaacctccagatgttactataa

SEQ ID NO: 22 - DNA, 684 bp, Nicotiana tabacum; identical to SEQ ID NO: 21

SEQ ID NO: 23 - DNA, 684 bp, Nicotiana tabacum; identical to SEQ ID NO: 21

SEQ ID NO: 24 - protein, 227 aa, Nicotiana tabacum
MNPANATFSFSEFDFLESIENHLLNYDSDFSGFFSTMSSSNALPNSPSSSFGSSPSAESSLDTSLWDENFEEIIPHLEEKSESEEETKGHVVAREKNATQDWRRYIGVKRRPWGTFSAEIRDPERRGARLWLGTYETPEDAALAYDQAAFKIRGSRARLNFPHLIGSNMPKPARVTARRSRRRSPEPSSSSCTSSSENGTRKRKIDVINSIAKAKLVCHGWNLQMLL

SEQ ID NO: 25 - DNA, 654 bp, Nicotiana tabacum
atgaatccccttgataatgcaaccttctttttctctgaccttgattttcttgactctattgagcaccatcttctgaatgattccgatttttccaacagtttttcgccgattagctcgagcagtgtcgcaactcctaatagtcctagctcatgtttttgcagctgccttttggatgaaaacattgaagaaacaacaactctcgaatctcaatccgagcccgaggagccaacgcaaggcttaaaggcggcgcgtgcggaaaacacgaagcaaaattggaggcggtacataggagtgagacggcgggcttggggaaagtttgcggcggagataagggacccggagagaagaggcgcgagattgtggctaggaacttatgagactcctgaagatgcagcattggcgtatgatcaagccgctttcaaaatccgcggttcgagagctcggctcaattttcctcacttaattggctcaaacatgcctgagccggctagagtaaaagggagacgtcataattcacgctcactggagccatcgtcttcttcatccaccacatcatcggaaaatggaagaaggaaaagaaatatagaggtcataaattctatagccaaagccaaattggttggtcatatacgcgatctagagatgtcactataa

SEQ ID NO: 26 - DNA, 654 bp, Nicotiana tabacum; identical to SEQ ID NO: 25

SEQ ID NO: 27 - DNA, 654 bp, Nicotiana tabacum; identical to SEQ ID NO: 25

SEQ ID NO: 28 - protein, 217 aa, Nicotiana tabacum
MNPLDNATFFFSDLDFLDSIEHHLLNDSDFSNSFSPISSSSVATPNSPSSCFCSCLLDENIEETTTLESQSEPEEPTQGLKAARAENTKQNWRRYIGVRRRAWGKFAAEIRDPERRGARLWLGTYETPEDAALAYDQAAFKIRGSRARLNFPHLIGSNMPEPARVKGRRHNSRSLEPSSSSSTTSSENGRRKRNIEVINSIAKAKLVGHIRDLEMSL

SEQ ID NO: 29 - DNA, 672 bp, Nicotiana tabacum
atgaattcagcagatgtaaccttctctttctctgattttaatctccttgaatccattaagcaacatcttttaaatgattcagatttttctgaaactctgtcgcctatgagttcaagtaacggattgcctaacagtcctagctcaggttttggcagctccctttcagcagaaaatagcttcgaaatctccctttcggaccaaaactttgaggaaacaataccaaatctcgaagaaaagtctgagtccgaggaggaaatgaaggggaatgtggtggcgcgtgagaataacgcgccggaagattggaggcggtacataggagtgaaacggcggccatgggggacgttttcagcggagatgagagaccccgataggaggggggcaagactgtggttaggaacttacgagaccgcagaggatgcagcgttggcgtacgatcaagccgctttcaaaatccgcggctcgagagctcggctcaattttcctcacttaatcggttcaaacatgcctaagccggctagagttacagcgaggcgtagtcgtacgcgctcacccgagccattgtcttcttcgtccacctcatcatcagtaaatgtaccaagaaaaaggaaaatagatgtgatcaattccatagccaaggtttgtcatggttggaacctccacatgttactataa

SEQ ID NO: 30 - DNA, 672 bp, Nicotiana tabacum; identical to SEQ ID NO: 29

SEQ ID NO: 31 - DNA, 672 bp, Nicotiana tabacum; identical to SEQ ID NO: 29

SEQ ID NO: 32 - protein, 223 aa, Nicotiana tabacum
MNSADVTFSFSDFNLLESIKQHLLNDSDFSETLSPMSSSNGLPNSPSSGFGSSLSAENSFEISLSDQNFEETIPNLEEKSESEEEMKGNVVARENNAPEDWRRYIGVKRRPWGTFSAEMRDPDRRGARLWLGTYETAEDAALAYDQAAFKIRGSRARLNFPHLIGSNMPKPARVTARRSRTRSPEPLSSSSTSSSVNVPRKRKIDVINSIAKVCHGWNLHMLL

SEQ ID NO: 33 - DNA, 348 bp, Nicotiana tabacum
atgcagcctggaatttcatcagaaatatttgacctaagcaatattctaagctacgattccatggaacatttctgtgaagattcttcctttccagaaatgagctcattcaataatattattggttcttcccaaaatattaaccctagcagcagcacaaatgaccaaaaaagcaatgaaaagggagatactgctcctacttcattacaaccgtgccataaccaaggaagtaagtcgcgtggtgtacacgatccaccaaactggaggagatacagaggcgtgaggcggcgcccgtggggaaagttcgcggcagagataagggatcctataaggaaaggcgctaggctttag

SEQ ID NO: 34 - DNA, 348 bp, Nicotiana tabacum; identical to SEQ ID NO: 33

SEQ ID NO: 35 - DNA, 348 bp, Nicotiana tabacum; identical to SEQ ID NO: 33

SEQ ID NO: 36 - protein, 115 aa, Nicotiana tabacum
MQPGISSEIFDLSNILSYDSMEHFCEDSSFPEMSSFNNIIGSSQNINPSSSTNDQKSNEKGDTAPTSLQPCHNQGSKSRGVHDPPNWRRYRGVRRRPWGKFAAEIRDPIRKGARL

SEQ ID NO: 37 - DNA, 621 bp, Nicotiana tabacum
atgaatccagctgatgaaaccttatctttctctaaccttgatttccttgaatctatcaagcagaaccttttgaatgatccaattgtttttgagaatttttcaaatgacgcattgtctaatagccctagctcaagttcagcagaaaacagctttaacacctccctttgtgatgaaaactgtgaaaagtccgagtccgaggaggaaagaaaggggcctatggtggcgcgtgagaaaaaagcgccgcaagattggaggcgctacataggagtgaggcggcggcaatgggggacgtttacggcggagataagagatccgaataggagaggcgcgagactgtggctaggaacttatgagagtccggaggatgcagcattagcttatgaccaagccgcttttgagatccgcggctcgaaagcacgtctcaattttccgcacttaattggctcgaccataactaagccggctagggttacaacgaggtgtcgtatgcgctcaccggagccatcgtcttcagcttcttcagaaaataggacaaggaaaagtaagatagatgtgataaactccatagctaaagcaaaatttattcgtcatagcttgattaatctgcaaatgttggtataa

SEQ ID NO: 38 - DNA, 621 bp, Nicotiana tabacum; identical to SEQ ID NO: 37

SEQ ID NO: 39 - DNA, 621 bp, Nicotiana tabacum; identical to SEQ ID NO: 37

SEQ ID NO: 40 - protein, 206 aa, Nicotiana tabacum
MNPADETLSFSNLDFLESIKQNLLNDPIVFENFSNDALSNSPSSSSAENSFNTSLCDENCEKSESEEERKGPMVAREKKAPQDWRRYIGVRRRQWGTFTAEIRDPNRRGARLWLGTYESPEDAALAYDQAAFEIRGSKARLNFPHLIGSTITKPARVTTRCRMRSPEPSSSASSENRTRKSKIDVINSIAKAKFIRHSLINLQMLV

SEQ ID NO: 41 - DNA, 711 bp, Nicotiana tabacum
atgaatccagctgataatgcaaccttctctttctctgacgttgattttcttgactctattgagcaccatcttctgaatgattccgatttttctaacagtttttcgccgatgagttcgagcaatgtcgcaactcctaatagtcctagctcaagttttggcagctgccttttggatgaaaacattgaagaaacaacaattctcgaatctcaatccgagcccgaggagggtggaaaggcagcgcgtgaggaaaacacgaagcaatattggaggaggtacataggagtgagacggcggccgtggggaaaatttgcggcggagataagggacccggagagaagaggcgcgagattgtggctaggaacttatcagactcctgaagatgcagcattggcgtatgatcaagccgcttttaaaatccgcggctcgagagctcggcttaattttcctcacttaattggctcaaacaatatgcctgagccgactagagtaacagggatacgtcataattcacgctcacttgagccatcttctacttcatccaccacatcatcggaaaatgggactaaggaaaagaaatatagaggtcataaattctatagccaaagccaaattggttggtcatatccgcgacctagagatattaatataactattcgaaaggaagagttttcagttctttttccaaatgcagcaacattactgcataaataa

SEQ ID NO: 42 - DNA, 711 bp, Nicotiana tabacum; identical to SEQ ID NO: 41

SEQ ID NO: 43 - DNA, 711 bp, Nicotiana tabacum; identical to SEQ ID NO: 41

SEQ ID NO: 44 - protein, 236 aa, Nicotiana tabacum
MNPADNATFSFSDVDFLDSIEHHLLNDSDFSNSFSPMSSSNVATPNSPSSSFGSCLLDENIEETTILESQSEPEEGGKAAREENTKQYWRRYIGVRRRPWGKFAAEIRDPERRGARLWLGTYQTPEDAALAYDQAAFKIRGSRARLNFPHLIGSNNMPEPTRVTGIRHNSRSLEPSSTSSTTSSENGTKEKKYRGHKFYSQSQIGWSYPRPRDINITIRKEEFSVLFPNAATLLHK

SEQ ID NO: 45 - DNA, 576 bp, Nicotiana tabacum
atgagttcaaataacgcatcgcctagtagtcctatctcaagttttggcagctccccttcagcagaaaataacttgaacacctccctttgggatgaaaactttgaggacacaatacaaaatctcgaagaaaagtccgagtctgaggaggaaagaaaggggcttgtggtggcgcgtgagaaaaacgcgccgcaagattggaggcggtacataggagtgagacggcgaccgtggggaaagtttgcggcggagataagggaccctgagagaagaggtgcgagattgtggctaggaacttatgagaccccagaagatgcagcattggcttacgatcaagccgctttcaaaatccgcggctcgagagctcagctcaattttcctcacttaattggatcaaacatgcctaagccggctagagtaacagcgaggcgtggtcttacgcgctcacccaagccatcgtcgtcttcatcaacttcatcatcagaaaatgtgacaagaaaaaggaaaatagatgtgataaattccatagccaaagccaaatcggtttgtcatgtttggaacctccagttgttactataa

SEQ ID NO: 46 - DNA, 576 bp, Nicotiana tabacum; identical to SEQ ID NO: 45

SEQ ID NO: 47 - DNA, 576 bp, Nicotiana tabacum; identical to SEQ ID NO: 45

SEQ ID NO: 48 - protein, 191 aa, Nicotiana tabacum
MSSNNASPSSPISSFGSSPSAENNLNTSLWDENFEDTIQNLEEKSESEEERKGLVVAREKNAPQDWRRYIGVRRRPWGKFAAEIRDPERRGARLWLGTYETPEDAALAYDQAAFKIRGSRAQLNFPHLIGSNMPKPARVTARRGLTRSPKPSSSSSTSSSENVTRKRKIDVINSIAKAKSVCHVWNLQLLL

SEQ ID NO: 49 - DNA, 654 bp, Nicotiana tabacum
atgaatccagctgataatgcaaccttctctttctctgaccttgattttcttgactctattgaccaccatcttctgattaattccgatttttcgaacagtttttcgccgatgagttcgagcaacgtcgcaactcctaatagtcgtagttcaagttttggcagctgccttttggatgaaaacattgaagaaacaacaactctcgaatctcaatccgagaccgaggagcaaacgcagggcggaaaggcggcgcgtgagagaaacacgaagcaagattggaggcggtacataggagtgagatggcggccgtggggaaagtttgcggcggaaataagggaccccgacaggagaggtgccagactgtggctaggaacttatgagaccccagaggatgcagcgttggcttacgatcaagccgctttcaaaatccgcggttcgagagctcggctcaattttcctcacttaattggctcaaacatgcctgagccggctagagtaaaagggagttgtcacaattcatgctcactggagccatcgtcttcttcctccaccccattatcggaaaatgggacaaggaaaagaaatatagatgtaataaattctattgccaaagccaaatcggttggtcatatccgcaatctacacatgttactataa

SEQ ID NO: 50 - DNA, 654 bp, Nicotiana tabacum; identical to SEQ ID NO: 49

SEQ ID NO: 51 - DNA, 654 bp, Nicotiana tabacum; identical to SEQ ID NO: 49

SEQ ID NO: 52 - protein, 217 aa, Nicotiana tabacum
MNPADNATFSFSDLDFLDSIDHHLLINSDFSNSFSPMSSSNVATPNSRSSSFGSCLLDENIEETTTLESQSETEEQTQGGKAARERNTKQDWRRYIGVRWRPWGKFAAEIRDPDRRGARLWLGTYETPEDAALAYDQAAFKIRGSRARLNFPHLIGSNMPEPARVKGSCHNSCSLEPSSSSSTPLSENGTRKRNIDVINSIAKAKSVGHIRNLHMLL

SEQ ID NO: 53 - DNA, 690 bp, Nicotiana tabacum
atgaatcccaataatgcaaccttctctttctctgagcttgatttccttcaatcaatagaaaaccatcttctgaattatgattccgatttttctgaaattctttcgccgatgagttcaagtaacgcattgcctaatagtcctagctcaagttttggcagcttcccttcggcagaaaatagcttggatacctctctttgggatgaaaactttgaggaaacaataccaaatctccaacttgaagaaaagtccgagtccgaggaggaaacaaaggggcatgtggtggcgcgtgagaaaaccacgacacaagattggagacggtacataggagttaaacggcggccgtgggggacgttttcggcggagataagggacccggagagaagaggcgcgagattatggctaggaacttacgagaccccagaggacgcagcattggcttacgatcaagccgctttcaaaatccgcagctcgagagctcggctcaattttcctcacttaattggatcaaacatgcctaagccggctagagttacagcgagacgtagccgtacgcgctcacccgagccatcgtcttcttcatgcacctcatcatcagaaaaggggacaagaaaaaggaaaatagatttgataaattccatagccaaagcaaaatttattcgtcatagctggaacctacaaatgctgctataa

SEQ ID NO: 54 - DNA, 690 bp, Nicotiana tabacum; identical to SEQ ID NO: 53

SEQ ID NO: 55 - DNA, 690 bp, Nicotiana tabacum; identical to SEQ ID NO: 53

SEQ ID NO: 56 - protein, 229 aa, Nicotiana tabacum
MNPNNATFSFSELDFLQSIENHLLNYDSDFSEILSPMSSSNALPNSPSSSFGSFPSAENSLDTSLWDENFEETIPNLQLEEKSESEEETKGHVVAREKTTTQDWRRYIGVKRRPWGTFSAEIRDPERRGARLWLGTYETPEDAALAYDQAAFKIRSSRARLNFPHLIGSNMPKPARVTARRSRTRSPEPSSSSCTSSSEKGTRKRKIDLINSIAKAKFIRHSWNLQMLL

SEQ ID NO: 57 - DNA, 480 bp, Nicotiana tabacum
atgaatccagcagacgtaaccttctctttctctgattttaatctccttgaatccataaagcaacatcttctaaatgattcagatttttctgaaattctttcgccaatgagttcaagtaacgcattgcctaacagtcctagctcaagttttggcatctccccttcagcagaaaatagcttcgaaacctccttttgggatgaaaactttgaggaaacaataccaaatctcgaagaaaagtgcgagtccgaggaggaaacgaaggggaatgtggaggcgcgtgagaagaacgcgccgcaagattggaggcggtacatagtagtgaaacggcggccatgggggacgttttcagcggagatgagagaccccgataggagaggggcaagactgtggttaggaacttatgagactcctgaggatgcagcattggctccgctttcaaaatccgcggctcgagagctcggctcaattttcctcacttaa

SEQ ID NO: 58 - DNA, 480 bp, Nicotiana tabacum; identical to SEQ ID NO: 57

SEQ ID NO: 59 - DNA, 480 bp, Nicotiana tabacum; identical to SEQ ID NO: 57

SEQ ID NO: 60 - protein, 159 aa, Nicotiana tabacum
MNPADVTFSFSDFNLLESIKQHLLNDSDFSEILSPMSSSNALPNSPSSSFGISPSAENSFETSFWDENFEETIPNLEEKCESEEETKGNVEAREKNAPQDWRRYIVVKRRPWGTFSAEMRDPDRRGARLWLGTYETPEDAALAPLSKSAARELGSIFLT

SEQ ID NO: 61 - DNA, 684 bp, Nicotiana tabacum
atgaatcccgctaatgcaaccttctctttctctgagcttgatttccttcaatcaatagaaaaccatcttctgaattatgattccgatttttctgaaattttttcgccgatgagttcaagtaacgcattgcctaatagtcctagctcaagttttggcagcttcccttcagcagaaaatagcttggatacctctctttgggatgaaaactttgaggaaacaatacaaaatctcgaagaaaagtccgagtccgaggaggaaacaaaggggcatgtcgtggcgcgtgagaaaaacgcgacacaagattggagacggtacataggagttaaacggcggccgtgggggacgttttcggcggagataagggacccggagagaagaggcgcgagattatggctaggaacttacgagaccccagaggacgcagcattggcttacgatcaagccgctttcaaaatccgcggctcgagagctcggctcaattttcctcacttaattggatcaaacattcctaagccggctagagttacagcgagacgtagccgtacgcgctcaccccagccatcgtcttcttcatgtacctcatcatcagaaaatgggacaagaaaaaggaaaatagatttgataaattccatagccaaagcaaaatttattcgtcatagctggaacctacaaatgttgctataa

SEQ ID NO: 62 - DNA, 684 bp, Nicotiana tabacum; identical to SEQ ID NO: 61

SEQ ID NO: 63 - DNA, 684 bp, Nicotiana tabacum; identical to SEQ ID NO: 61

SEQ ID NO: 64 - protein, 227 aa, Nicotiana tabacum
MNPANATFSFSELDFLQSIENHLLNYDSDFSEIFSPMSSSNALPNSPSSSFGSFPSAENSLDTSLWDENFEETIQNLEEKSESEEETKGHVVAREKNATQDWRRYIGVKRRPWGTFSAEIRDPERRGARLWLGTYETPEDAALAYDQAAFKIRGSRARLNFPHLIGSNIPKPARVTARRSRTRSPQPSSSSCTSSSENGTRKRKIDLINSIAKAKFIRHSWNLQMLL

SEQ ID NO: 65 - DNA, 615 bp, Nicotiana tabacum
atgtacgaacaaacaaccatctcagattctgatctctccgtccttgaaaacatcaaattccatcttctaaatgatactgatttttcacaaatattttccacgttcgatcaatgttttagtaatgcagaaaatattaatagcccgaactcgagttttggtagctctccaacagcagaaattagctggggcgatatgttaactagtatcaatagctcgtgggaaccagtcaataagttggagcacaaggaggagcatgtggtggcgcgtggtgtgcacgcacctcaggattggaaccggtacaggggtgttaggcggaggccgtggggtaaatttgcggcggagataagaaacccggataggaaaggcgcccggctttggctgggaacttacgagacacccgaagatgcagcattggcttatgaccaagccgcatataagatccgtggctctaaggctcggctcaacttccctcacttaatcggctcgaacatatccgagccggttagagtggctccgagacggcgttgcctatcgccggagatttcatcatctattttttcgtcgtcatttgttgaaaatatacctctaaagaagagaaaattggctgaaaattga

SEQ ID NO: 66 - DNA, 615 bp, Nicotiana tabacum; identical to SEQ ID NO: 65

SEQ ID NO: 67 - DNA, 615 bp, Nicotiana tabacum; identical to SEQ ID NO: 65

SEQ ID NO: 68 - protein, 204 aa, Nicotiana tabacum
MYEQTTISDSDLSVLENIKFHLLNDTDFSQIFSTFDQCFSNAENINSPNSSFGSSPTAEISWGDMLTSINSSWEPVNKLEHKEEHVVARGVHAPQDWNRYRGVRRRPWGKFAAEIRNPDRKGARLWLGTYETPEDAALAYDQAAYKIRGSKARLNFPHLIGSNISEPVRVAPRRRCLSPEISSSIFSSSFVENIPLKKRKLAEN

SEQ ID NO: 69 - DNA, 699 bp, Nicotiana tabacum
atggaaatgaatctagctgacgaaaccttgtttttctctgagtctcatctccttgaatcgataaagcaacatcttcttgatgattcagatttttctgaaattttttcgccgatgagttcaagcaacgaaatattgcctaacagtcctagctcaagttttagcagcttcgactgcagcttcctcaattgggatgaaaactttgaggaaacattaataccaactgatcaaaatccttcacatgagaagtgctccgagtccgaggagcaaacccagggcccagcggtggtgcgtgagaaaaacgcgccgcgagattggacgcggtatataggagtgaaacggcggccgtgggggacgttttcggcggagacaagagacccaagtaggaaaggtgaaggtgcaaggctgtggttaggaacttacgagaccgcagaggatgcagcgttggcttacgatcaagccgctttcaaaatccgcggctcgagagctcggctcaattttccccacttaattggctcaaacatgcctaagccggctagagtaacagcgaggcgtagtcgtacgcgctcacccgagccatcctcttcttcatccacttcatcatcagaaaatgtgccaagaaaaaggaatatagatgtgataaattccatagccaaagccaaattcctttgtcatagcttaaatttacagagattagcttaa

SEQ ID NO: 70 - DNA, 699 bp, Nicotiana tabacum; identical to SEQ ID NO: 69

SEQ ID NO: 71 - DNA, 699 bp, Nicotiana tabacum; identical to SEQ ID NO: 69

SEQ ID NO: 72 - protein, 231 aa, Nicotiana tabacum
MEMNLADETLFFSESHLLESIKQHLLDDSDFSEIFSPMSSSNEILPNSPSSSFSSFDCSFLNWDENFEETLIPTDQNPSHEKCSESEEQTQGPAVVREKNAPRDWTRYIGVKRRPWGTFSAETRDPSRKGEGARLWLGTYETAEDAALAYDQAAFKIRGSRARLNFPHLIGSNMPKPARVTARRSRTRSPEPSSSSSTSSSENVPRKRNIDVINSIAKAKFLCHSLNLQRL

SEQ ID NO: 73 - DNA, 2862 bp, Nicotiana tabacum
cgaaatccgaaatatgctaaatccgatcgatctgatccgtgcacaacccaaacttcagctaggagtctataactcactactagattttatagtaactaattgatactagtaaatccataaaaatcgcgccgactttccttctcctacgcaatttctcacgattaaatcggctctcaaactctttcgtcgaaccctctttccttttttccactcactttcctcatttaaattcagctcaatttcacctccataatatatacacacactctctccattttcactcactccttatcaccaaacaattcttgggtgtttgaatatatacccgaaataatttcctctctgtatcaagaatcaaacagatctgaattgatttgtctgtttttttttcttgattttgttatatggaatgacggattatagaataccaacgatgactaatatatggagcaatactacatccgatgataatatgatggaagcttttttatcttctgatccgtcgtcgttttggcccggaacaactactacaccaactccccggagttcagtttctccagcgccggcgccggtgacggggattgccggagacccattaaagtctatgccatatttcaaccaagagtcactgcaacagcgactccagactttaatcgatggggctcgcgaagggtggacgtatgccatattttggcaatcgtctgttgtggatttcgcgagcccctcggttttggggtggggagatgggtattataaaggtgaagaagataaaaataagcgtaaaacggcgtcgttttcgcctgactttatcacggaacaagcacaccggaaaaaggttctccgggagctgaattctttaatttccggcacacaaaccggtggtgaaaatgatgctgtagatgaagaagtaactgatactgaatggttttttctgatttccatgacacaatcgtttgttaacggaagcgggcttccgggcctggcgatgtatagttcaagcccgatttgggttactggaacagagagattagctgtttctcactgtgaacgggcccgacaggcccaaggtttcgggcttcagactattgtttgtattccttcagctaatggtgttgttgagctcgggtcaactgagttgatattccagactgctgatttaatgaacaaggttaaagttttgtttaattttaatattgatatgggtgcgactacgggctcaggatcgggctcatgtgctattcaggccgagcccgatccttcagccctttggctgactgatccggcttcttcagttgtggaagtcaaggattcgtcgaatacagttccttcaaggaataccagtaagcaacttgtgtttggaaatgagaattctgaaaatggtaatcaaaattctcagcaaacacaaggatttttcactagggagttgaatttttccgaatatggatttgatggaagtaatactcggtatggaaatgggaatgcgaattcttcgcgttcttgcaagcctgagtctggtgaaatcttgaattttggtgatagtactaagaggagtgcttgcagtgcaaatgggagcttgttttcgggccaatcacagttcgggcccgggcctgcggaggagaacaagaacaagaacaagaaaaggtcacctgcatcaagaggaagcaacgatgaaggaatcctttcatttgtttcgggtgtgattttgccaagttcaaacacggggaagtccggtggaggtggcgattcggatcaatcagatctcgaggcttcggtggtgaaggaggcggatagtagtagagttgtagaccccgagaagaagccgaggaaacgagggaggaaaccggctaacgggagagaggagccattgaatcatgtggaggcagagagacaaaggagggagaaattgaatcaaagattctatgcacttagagctgttgtaccaaatgtgtcaaaaatggataaagcatcacttcttggtgatgcaattgcatttatcaatgagttgaaatcaaaggttcagaattctgactcagataaagaggacttgaggaaccaaatcgaatctttaaggaatgaattagccaacaagggatcaaactataccggtcctcccccgtcaaatcaagaactcaagattgtagatatggacatcgacgttaaggtgatcggatgggatgctatgattcgtatacaatctaataaaaagaaccatccagccgcgaggttaatgaccgctctcatggaattggacttagatgtgcaccatgctagtgtttcagttgtcaacgagttgatgatccaacaagcgactgtgaaaatgggaagccggctttacacgcaagaacaacttcggatatcattgacatccagaattgctgaatcgcgatgaagagaaatacagtaaatggaaattatcatagtgagctctgaataatgttatctttcattgagctattttaagagaatttctcctatagttagatcttgagattaaggctacttaaagtggaaagttgattgagctttcctcttagtttttgggtatttttcaacttttatatctagtttgttttccacattttctgtacataaacatgtgaaaccaatactagatctcaagttcttgtttttagttcatgtaattagaaataaatatgcagcttcatctttttctgttatggtctgctccatccctttgtattctttatccagaatataaatgaagaaagcaataatagggcaggggtagtccacggcattggttttttggtaagagcgttacacattgatgtgtaggtttaggcatgttgcaagttcgaatctagcggcagaccccttatacgtggagtttcgaaccttgtg

SEQ ID NO: 74 - DNA, 1980 bp, Nicotiana tabacum
atgacggattatagaataccaacgatgactaatatatggagcaatactacatccgatgataatatgatggaagcttttttatcttctgatccgtcgtcgttttggcccggaacaactactacaccaactccccggagttcagtttctccagcgccggcgccggtgacggggattgccggagacccattaaagtctatgccatatttcaaccaagagtcactgcaacagcgactccagactttaatcgatggggctcgcgaagggtggacgtatgccatattttggcaatcgtctgttgtggatttcgcgagcccctcggttttggggtggggagatgggtattataaaggtgaagaagataaaaataagcgtaaaacggcgtcgttttcgcctgactttatcacggaacaagcacaccggaaaaaggttctccgggagctgaattctttaatttccggcacacaaaccggtggtgaaaatgatgctgtagatgaagaagtaactgatactgaatggttttttctgatttccatgacacaatcgtttgttaacggaagcgggcttccgggcctggcgatgtatagttcaagcccgatttgggttactggaacagagagattagctgtttctcactgtgaacgggcccgacaggcccaaggtttcgggcttcagactattgtttgtattccttcagctaatggtgttgttgagctcgggtcaactgagttgatattccagactgctgatttaatgaacaaggttaaagttttgtttaattttaatattgatatgggtgcgactacgggctcaggatcgggctcatgtgctattcaggccgagcccgatccttcagccctttggctgactgatccggcttcttcagttgtggaagtcaaggattcgtcgaatacagttccttcaaggaataccagtaagcaacttgtgtttggaaatgagaattctgaaaatggtaatcaaaattctcagcaaacacaaggatttttcactagggagttgaatttttccgaatatggatttgatggaagtaatactcggtatggaaatgggaatgcgaattcttcgcgttcttgcaagcctgagtctggtgaaatcttgaattttggtgatagtactaagaggagtgcttgcagtgcaaatgggagcttgttttcgggccaatcacagttcgggcccgggcctgcggaggagaacaagaacaagaacaagaaaaggtcacctgcatcaagaggaagcaacgatgaaggaatcctttcatttgtttcgggtgtgattttgccaagttcaaacacggggaagtccggtggaggtggcgattcggatcaatcagatctcgaggcttcggtggtgaaggaggcggatagtagtagagttgtagaccccgagaagaagccgaggaaacgagggaggaaaccggctaacgggagagaggagccattgaatcatgtggaggcagagagacaaaggagggagaaattgaatcaaagattctatgcacttagagctgttgtaccaaatgtgtcaaaaatggataaagcatcacttcttggtgatgcaattgcatttatcaatgagttgaaatcaaaggttcagaattctgactcagataaagaggacttgaggaaccaaatcgaatctttaaggaatgaattagccaacaagggatcaaactataccggtcctcccccgtcaaatcaagaactcaagattgtagatatggacatcgacgttaaggtgatcggatgggatgctatgattcgtatacaatctaataaaaagaaccatccagccgcgaggttaatgaccgctctcatggaattggacttagatgtgcaccatgctagtgtttcagttgtcaacgagttgatgatccaacaagcgactgtgaaaatgggaagccggctttacacgcaagaacaacttcggatatcattgacatccagaattgctgaatcgcgatga

SEQ ID NO: 75 - protein, 659 aa, Nicotiana tabacum
MTDYRIPTMTNIWSNTTSDDNMMEAFLSSDPSSFWPGTTTTPTPRSSVSPAPAPVTGIAGDPLKSMPYFNQESLQQRLQTLIDGAREGWTYAIFWQSSVVDFASPSVLGWGDGYYKGEEDKNKRKTASFSPDFITEQAHRKKVLRELNSLISGTQTGGENDAVDEEVTDTEWFFLISMTQSFVNGSGLPGLAMYSSSPIWVTGTERLAVSHCERARQAQGFGLQTIVCIPSANGVVELGSTELIFQTADLMNKVKVLFNFNIDMGATTGSGSGSCAIQAEPDPSALWLTDPASSVVEVKDSSNTVPSRNTSKQLVFGNENSENGNQNSQQTQGFFTRELNFSEYGFDGSNTRYGNGNANSSRSCKPESGEILNFGDSTKRSACSANGSLFSGQSQFGPGPAEENKNKNKKRSPASRGSNDEGILSFVSGVILPSSNTGKSGGGGDSDQSDLEASVVKEADSSRVVDPEKKPRKRGRKPANGREEPLNHVEAERQRREKLNQRFYALRAVVPNVSKMDKASLLGDAIAFINELKSKVQNSDSDKEDLRNQIESLRNELANKGSNYTGPPPSNQELKIVDMDIDVKVIGWDAMIRIQSNKKNHPAARLMTALMELDLDVHHASVSVVNELMIQQATVKMGSRLYTQEQLRISLTSRIAESR

SEQ ID NO: 76 - DNA, 1354 bp, Nicotiana tabacum
atttttctctctattttctacaaaatttattccctctcaaatatacaaaccacatttccctatttagtttctttcaatatatataaatcccatcaaccctttttcatccaaaaaactcataattcactttgaattgtttatcccaatttccaaatttaattcttttttctttcagcaaaaatgatgtttgaaaacagtgaatttttgaatgattttacccttcttgaattcattaaacaacatttacttgaagactgggaatctcctgttacaaattgccaaagcaaaaacattgagaacaaattatttcctaatttcttttctgatacttttgataatttcgcaattagcgaaaatgacactgcaaatatgtttatttacaataatgccactattgagcattcagctgctgcagtcaaaatcgagcctgaatttactaatttcttagaaaatgacagagaaaacatgtatatttacaacaatgacattaacgagccgacacaatctgcggtcaaaacagaacctgaagttagcgttagttcgccggaaatgagtaatttcaccgcattcacggctgcgccgccgccgccgaaaaaagcagagcgttacaggggagtaaggcagaggccgtggggaaaatttgcggcggaaattagggatccagcgaagaacggagctagggtttggttagggacatacgagacggcggaggatgcggcgttggcgtatgacaaggcggcgtatcgaattcggggatcgcgtgcagtgttgaattttccgttgagggttaattcgggtgaaccggaaccggttcgggttggttcgaagaggtcgtcaatttcgccggagagttcttcctcgtcgtcgtcggaaaatatttcgacgaagaggacgaagaaggttgcccaactatacagctgagggttaatttgggaatttcaaaattgtacaattccatgaacaggttgagttcaatattttatttcatttcctctcctcgtagaaatttgttcttctcggtaggattgaggaatttgttcaatgtattaaatttttcgtttaaaataacatttattactctcttcatctcaattacgtgactcaaaaaaagatttttaaaataattgataatattattacgcttataaaagtttttaattaagaataaatagaaagaccatgatacacttgcttaggaacaaagaaaagcataatttaggatcaaagaaaagtaaagtgtacaaaaacctaggaatctcaactggaatacctcactgcaccggtaccggttatgagccacatttaacgaagagtttctggtctttgtcccattaatgtattataaattgcaagg

SEQ ID NO: 77 - DNA, 741 bp, Nicotiana tabacum
atgatgtttgaaaacagtgaatttttgaatgattttacccttcttgaattcattaaacaacatttacttgaagactgggaatctcctgttacaaattgccaaagcaaaaacattgagaacaaattatttcctaatttcttttctgatacttttgataatttcgcaattagcgaaaatgacactgcaaatatgtttatttacaataatgccactattgagcattcagctgctgcagtcaaaatcgagcctgaatttactaatttcttagaaaatgacagagaaaacatgtatatttacaacaatgacattaacgagccgacacaatctgcggtcaaaacagaacctgaagttagcgttagttcgccggaaatgagtaatttcaccgcattcacggctgcgccgccgccgccgaaaaaagcagagcgttacaggggagtaaggcagaggccgtggggaaaatttgcggcggaaattagggatccagcgaagaacggagctagggtttggttagggacatacgagacggcggaggatgcggcgttggcgtatgacaaggcggcgtatcgaattcggggatcgcgtgcagtgttgaattttccgttgagggttaattcgggtgaaccggaaccggttcgggttggttcgaagaggtcgtcaatttcgccggagagttcttcctcgtcgtcgtcggaaaatatttcgacgaagaggacgaagaaggttgcccaactatacagctga

SEQ ID NO: 78 - protein, 246 aa, Nicotiana tabacum
MMFENSEFLNDFTLLEFIKQHLLEDWESPVTNCQSKNIENKLFPNFFSDTFDNFAISENDTANMFIYNNATIEHSAAAVKIEPEFTNFLENDRENMYIYNNDINEPTQSAVKTEPEVSVSSPEMSNFTAFTAAPPPPKKAERYRGVRQRPWGKFAAEIRDPAKNGARVWLGTYETAEDAALAYDKAAYRIRGSRAVLNFPLRVNSGEPEPVRVGSKRSSISPESSSSSSSENISTKRTKKVAQLYS

SEQ ID NO: 79 - DNA, 15463 bp, Nicotiana tabacum
aaacgtacaaaatttgtgaagcagaactataagtcaacggataagcacctggaagaaagagaaaaacaaccgtcgtcaactgtcgtgtccggcagcatctccaccggtcaccaccggctgaaaagagcaaaaaccaccgtcatcaaccactgcgtcagccgggcactccatcggcaactaacgcttaagctgccggaagtagaaaaaaaatgtccattttgcactcgccatctctcattttcaacactaaaaccaccattaaaccctactgcctcatttcatttcttccttattcttcaatctcgaactttagatttagaaaatttacaattcattcatccttttcattatttaatgatcctcaagatttttttgtaccaaaatctccgggcaataaactcaaccaaaacgacagcaattctgatgataaacaaatctcatttgttgatgagtggggcgagaggtcggaaccggatacccgacccgtaacgaagttatcagaatcggatcctcctataaatgatgacgaatggggcagaggagctgaattagtggggagcagcaacaatccagtaattgaagatgagtggggtgagaagtcgtatccggagccccggcccgctccgacagtgtcggattcggatcctcctatagacgaagacgaatggatcggagctaagccagttaaaaatgagagcgtttctgataataaaacagcgtcggatccggagacccgacccttaacgagattaccagtttcggatcctccgaaaggtgaagaagagagggttgcagagctgaaaaggtgcttaatggacacggtttatcggacagaatttgggctcagggcctcatcggagattcgggccgaggctctggagctggtttctcagttggaggcagcaaatccaactccgagcccagttgaatcacctgagttgcttgatgggaactggattttagtgtgagttgttgattctcatttctctttttaaattttctgtttttggctttatgtactcgcggttgtatgaaatgtatgtgaatcaagtggactaagtggcggattcatattgttgttccaactaagttgggatcaatgagtagttgattggaataaaaagatttatataggcgataccaattagtagttgggaatatattttagttgtattatttgttcttggaaacaacctctctacttgcacaaggtaggggtaagatttgcctatacactatcctagacctcacatatgggaatatagtgactgtattgttcttgttgatatgttttttaggtgctatatcttctaggaatattttagccattttggagaatttggtggtggtgaaaagtatagagaacttctaatactctttattttttttattcggcataatgtggtcatgcataatattgacatgcgatgatttaaatggagtaacatgatcagtggagattcatatactagaccccaatttgtttggggttgaggcatagttgttactactgttatctgcataatgttggcttgagatgagaattatggttaataaggattcatatagttgatccggcttgtttcgattgaagcatatttgttattattgttgtaaggaatagttgattgatttgtttatgtacttgcgaagctatatgagattacagctgacagtatcatttaaactgatgctgccatgcttcattttcttcaaatttccttcgttgttttgctgaaagtagctctagtcttggtattttgagtgaacatgctagctaagattatacgataaaacagtttgaattcgattttttgttaacatatagattcatcgtgagagcttgaagggaactgatcacgcccaactatgccttataaaaggacaatgcggacgttgcaaatataacctgagtatttatgcccagagtcgaatccacagagaattaacctatcaattactttcgttggacttactaaattctttagaatcaacttccccaaacgttgtgaataacagttgatggtatatttaataactaagattgaaagtcaataaacagttgtaaactaaatatgcttaagttgtgaacaataatgagaaggttctaaggtagtgatttcccctattgatggaatcccttctgtttatgtttcatatagatttaccaacacatctctatcaaccatgaacactctttttaccgtgaatctctcccgagtaatcacgataatttactagacgcactcccccgagatacgctagctggctttgtttattacagttcactttagattgcacccaagacttcgttatccctaattccacctttaaacccgcagttatagatccctcttatactttagtactggtgttgttcaacaatcacctaaatatgcactctctcccgagttatgcatactaaataggcacaactaattgaggatcctgtcaattaactacaacaaacacgtagttgaacaaatagagattaaactggcaaactatattaacataatcaagaagttcatccttcaataggttctatcaaaaccctagacaaaagatttagctactcatgacaatgagtaaataaactttgaaaatattcatgatcaaaattgcaagaaaaataaagagaagaagaaaatatgatgttttgggtgatctctcacacttgtttctcttgccaaagtactttctaaaacattacatgcctcccttggacgagttctattgtttaatatagggttttgggctaaaaatcccgtgttttgcacttcagtccctcaatttttttcgcttcctaccgcggttacgccaggaccgcggccaactagcctctcagaatccgcaacagccttctgccgcggtcagaccgcggttacgccgggaccgcggcagtccatctccagttctggttttgctgccttcgcgtggtgcacttagcgaatattgtaagattggcctctttttcttcgtaattgatcccaaaagtactccatagacttcttttattgtatatagcctgcaaagcatgaaaaacactaattagagcattttgttatcactttttaccataaaaactatacaagaaggtggttctttagggcctaattatagtccaattcacctattatcaataccccacacttaaatctttgctcgtcctcgagcaagttgaaccacacttctaggcctaatcgttcgatgcattacccagtttatgtcacacccaccattatgaaagaacaacctaagcagtgcaacagccacacctcatatgaagactctaatgccatgccacactcgtgcttactctagttactctaaatagagttgaaaactcgctttttcttcctgagtcacatgccctcacatcacatttctgagagaagttccacacacataaaatcaagcaacaaggaactatagatagaacgaatccacccactctcagcaaagaacattcacatgccacacagatataccatacgcttgcccttagtgtaatactgtactaatcaagttgttcagtccaagatcaagaggtctttatttggttataatgtaggctaagggacgggtaggatatatttggatatagtgactaacctcccgaaacacttttaatacaatcgttccctttattccaatttccatgttcaacccaatcattcttccacacttgtttcataggctaccccacttttctttaggtgcaactggcctcttttttttttttttcatagtcattgcaccattcaagtattttcctgattttccttttccctctccattactaccccacactttgacttttatatgctctttaacgattcaagtgcttctaggaggtacaggttcaaacaatcaaattattcaaacacagggatgtaggttattgtaaggttatcaaagaacaggcttcaggctcgaaggggttaactatgacaatatgtacatgtggattcataattatacaagctacacaaggaactgcctcaatcatctctaaggccaaacaacttctatttcgctttgcaaacacacagggcaagttctaggtatcgcatgcaagcacagaatacaagtattatctcacacacacttgacatgtaactcattccgaattagtttgtcaacacactcacgtgagcattcaagaaagacaaggtgtgcagaattaaggcataaaattacgagtctacaaacgagcctagacgtcgcaccctcaagttcgttttcgttatttgcaggtgtgtacattacgggttgcattcttgccttcacccattttggtccaatagagtcctaagggtcctaaaaatattaaagaaaaatctacctaacccggttcaagaaaagcccttggaaaagaaccgtggtcaaaagaaaaaccaaagaggaattactacactaaataaaaaaaatctaaatggattacttcccttaagagtactgtccaagtggtccgtcctcaggaagagtctcctacatttatttattttacaaccaatgtatatgtacactaacaatacaccactaaagcaagtctcccacccaacacaaaaagaatatggcatgtccccatgtcattacacaaataaagtgcagaagggtaagaagacttccctgagcgtcactcggagtcggagacggtgctgggatccacatgacaagccctccccaaagcacgaaaccaagctatcatccggctctcagacctggcctgctgctgagacatggcatccatacgcacatgcaagccatccaccgaggagcgaagatctgccacctcttcctccaaagaatgcaacatgggtcggctggactatgatctagagaaccctgcccagtatggggtcgccgagaggatccggctccatcataggatctcttggatggtgccatgggtgctgaggcgtcatcctaatcatcaagctcaatggttatgggtgtatctctgcccactgtgatctttgaagctctgaatgccgcttttgcgggcaaagctccatctgtaggattggtggggacaccatccagcagacacaacctcgtcacaagtgaggggaagttaaaccccttagatagcagaggtgaccgaaggatcatttcatctccaataattctcgccacatcaaagtctttcttggtgacgaagcaccacaccaatagagcccgtaggtggttcacatctgtcgtgttgcccgtgggcaataaccggctgcaaataatggtgaaccagcacttagcctcatgtgtgaacgacttggagtgaagggtaatgttttcctgtagccagattggtcaaccccctgcgcagattgtctcaatcatagtgtcccaagtgaccccttggacgtcgtggtaatgatcaatgtcaccagtgaactggggcagctgcaagacctggtgaatcttcagaattgaggcatctaccaccctgccccgcacaatcacagaccgacacaaattttccgggcagttcgcgtagaactcccggactatcatcgggtttgccgtctcaggttcatcaaacaagaactccatctccctccgtttgatttcctcatacatgtctgctttttccatacggagggcagccatgtcaacaggaatctcagggataaagcttttggtggccttagcatgaaacgcgtcctctgcctcctgtgactgaaacctggtggcatcatatattggcatttgggaagtgcttgccgagctctttcgcctttttcgggccatattacctgcagacaattcagggtaacaatcagatgcatcctaacatgtgccagtcggatgggtactcagacttcgccacctgatggcaccgaacagtttccttttgacaatcaatgtcagtatacccaattagtaaggtgcccaaagttgacaacttccactagtgccctcacaccactattaattctacaattccgccatataataccccacacaatctcccacaagcgaatcatgtcaaatgctaccaccaccacaaaccaagaagggcacaaagtgctccaaaattttacaacacacccccaattttcggccatttagacccctccaccaagcttcaccctaaaaaatttgtttaggcctccaaaccttctaaaaatcgcccccaagttaagcacaatgaacacccaaccatttaaacatcaatcatggccaaaagaagcaaataatggagaaaaggaaagaagaaaaagaaagaaaaaaaaaattacactaaaacactacactaagttatgtaaaagaaagagaaaagaataaagaagcttaccttgaggatgaatggaagggataggtggtggagagagagatcgagaagaaaggaggggcaacaatgggggtttgagggataggagagtgtgaaagagagaagagaagaaagaaggggatgggggaatagtgggggttaggtttattaaaagggggggaaaaaaattctgcacttacctggctcgcgctggtctgtcgcggttacgctgagaccgcggtaaacctctttcagagggggtatttgaccgcggttacgctgggaccgcggtagacttctgtcagaggaggtccttgaccgcggtccgaccacggttacgctgggaccgcggtctgggcgtgttcctgctactacttttttttattttttatgcattacacttacaacacattcgtgggttgcctcccacgcaacgcctgatttaacgtcgcggcacgacgcagatgagcgcatttaaggctcgctcgacctctgtggttcagtcagatgtagctcagacacttcctttggttcgctcatgcccacatatagtttcaatctctgcccattaactctaaatgtacgagagtctttctctgtggcattctcgacaacacctgaagggaaaacttcgaccactctaaatggtccagaccatcgtgacctgagtttacccggaaatagccttaatcgtgagttataaaacaacaccatatctccaggattgaaatttcgctccacaatgttcttgtcgtgcaacctcttcattctttccttgtacaaccttgtgctctcaaaagcaagatgtctgagtgtcgagctcatgcaattctgtgattctcgttgtgcccgcagcctcgatgtctagattcatctgtttcagtgcccaccacgctctatgttcaagttccactggcaaatggcaggccttcccgaacaccagcttatatggtgacataccaatcggtgttttaaaagcagttctataggcccagagtgcatcatctaactttttcgcccaatcagttcttgtagcgttcacagtcttggttagcacactctttatctctctgttggacacttcaacctgcccactagtttgcgggtgataaggggtagccacctagtggcgtacatcatactttgcaagcaacttctcgaaagctctattacagaagtgagtgcctccgtcactgataatcgcttttggtatcccaaatctggtgaatatgttcttcttcaaaaaacccaccaccactcttgcatcattagtgggcaacgctacttcttctacccatttggacacgtaatccacagcaacaagtatgtacttattgccataggagctgacgaagggacccatgaagtcaatcccccagacatcaaacaattccacctcttgaattgggttcatgggcatctcatggcgacggaaaatgttcccggtccgctgacattcattgcagcccttcacccattggtgcgcatctttaaacactgttggccaaaagaatccggcctcaagcactttcgcagctgtcctgaccctccaaaatgtcctccataagccgatgcgtgacaagcctgcaaaacagaagattgttctatctcggggacacacctccggatcatattgtcaacacaaattctaaacaggtaaggctcatcccaataatacatgcggcagtcacgataaaacttttcttttgtacagatgaaaggtcataggaactataccgcaggccaggtaatttgcaaagtctgcataccatggcgcttctcaagattagtagcgagcagctgctcgtctggaaaggtttccagaatatcttcaacctcaactgcattttcagctccctcaagtctgatagatgatcagcgacttggttctctgtgcccttacggtcacgaatttcaaggtcgaattcttgcagcagcaaacacccaacgaatcaggcgcggcttagactccttcttctcaatcaagtacctgagagctgcatgatcagtgtatacattaccttagaaccaatcagatatgatctgaacttgtcgaaagcaaacaccacagccaacatctccttctcagtcacagtatagttcagctgggctccactcaacgttctactagcatagtagattggatgcatcagcttgtccttccgttgtctagcactgcccccactgcgtagtcactggcatcacacatgagttcgaagtttgctcccagttggggaacaatgataggtgttgtgaccagtctctttttcagctcctcgaatgctacctgcaatcatcagaaaaaacagaaagggtgatctttttctaacaacttacagagagggttggcaatttttgagaagtcttttatgaatctccggtagaaaccggcatgcccaaggaagcttctgattgctttgactgaagttggaggaggtactttgctattacatccactttagcacgatccacctcaattcctttgcttgacacccggtgccccaagaactatgccttctgtaccatgaagtggcacttctcccagttcagaaccagttagtctcgatacaccgtttcagcacacgcgtcagatttatcaggcactcatcaaatgaattccccaccactgagaagtcatccatgaacacctccattatgtcctctaccatgtcagtgaatatggccatcatgcaccgttggaatgtggcgggtgcgttgcataggccaaagggcatcctccgaaaggcataaatgccataagggcaagtgaaagaggtcttctctctgtcctccggtgcaatggagatctggttgtatcctgagtacccgtctagaaaacagaagtgtgacctccctgccagtctgtctaacatctgatcaatgaaggaagtgggaagtggtctttccgggtggctagatttagctttctataatccatgcaaattctccagcccgtgactgttcttgtagagatcaattcattgttatcattcttaactaccgtcatgccaccctttttaggtacacattgaactgggctaacccagctgctgtcagagattgggaagataattcccgcgtctaaccactttattacttccttcttcaccacttccttcatgttagggttcagccttctttggtgttccctggaagtttgtgtccctcttccagtagaattttgtgcatacagtaggcggggctgatcccctttatgtctgccatggtccacccaatggcagtcttgcactccttaagtacctgcaagagttgttgcgcctgcacatctaacaaactagatgagataataacaggtaatgtggagttaggtccaaggaattcatacctgagatggttgggcaatggctttaactccagctttggtggttcttcgatagatggcttggctggaggagtctctcgattttccaagtgcaaggctcaaattctagagttctatcccagaaccctctaccctctaatgccaacacccattccgccagttcctctccattcacctcatccaaattcattaaacatgcagcaagggggtcctcaatggttagcacctcatcatcagtctccacgattacatccacggcatcaataagagaacaattggcgaattcacttggttgcctcatagatttctgcacattgaatgttatctcctcatcgttcaatctcatcttgagctccccgatttcacaatcaatgagagctctcctgtggccaagaatggtcttcccaaaattatgggaatctcttcatccactctgcagtctaagatcacaaaatctacagggaacacaaatttccctacctgaactagcacatcatccagtataccagagggtcgtttcactgtcctgtcagccagctgcaacaacatagaggtgggtctagctcttccaatgcccagcctcttataaatcgccagggcataagattgatgtggcccctagatcacacagtgctttagcaaaagcaaaattaccaatagtgcatggaattgtaaagctccctggtcagacagcttttctgcaattggtctagtcaccactgcactacatgtctgagtaagagtaactgtggccaagtcttggaaatcaaactttcgggacatcaagtccttcatcatttttgcatacccaagcatctccttcaaagcttcaatcaatggtatgtttacctggatttgtttcagcatttcgaagaacttcttgtattgttcctccttttggtacttagccagcctctgagggaaaggtgcaggaggtctcttcttcccaatcaactgggattgatccttatcagctgctacatcaactactggttcctggactgtctcagcttctttctcggtcgcattctggatgctattttcttcctgggcaggctggactggcacctccgtcagtttcgttgactcatccagctcaatgggcactggtataagtgtctcagcttgtctagtttctcgagccctctcttgctctacatccagatctctgccattacgtagacttaccgccatcagctgctttgggccttgatcttttggatttatctgggtgtctgcaggtagtgtcccatgaggacgattgttcagagacatagaaatttggcccacctgcacttcaatattcttgattgctgcatcatgtgcatccactctctcattaatctttgcattagacccaataacctgctgcatcattgcctcaagtctagcaaacccatcttcctgccttccaccatgctgctgctgaggagggtgatacccttgctgctgattctgattattatatccctgtggccttgggtaaggtgccatattgttagggggtctcatacctcccatgtttccattgttgaactgtggatggactgacctgtattgcttattttgctggccccaattctgaccaccctgtctctggcctccataattagacacataattcatgtcttcagggtagtgatgatgatcatgttctgcattccattggttaccgattgactgactaatgcaagatgcgcacaagccccattagtagtatctacgatgtgtacctgctgcttctgccttgactcttccacctttttggtgagtatactcatctgtgtcaataaggtggccatatttcagccatagagttggatggatctaagggcactgagtgaaccactggagtgataggtgcattcctggttgtcaatcccgaattttgtgccatcttgtcaagcaaactctggctttctctccatgttttgctcaaaaatgctccaccagctgaagcatcaacaatgttcttcacgctatctgacaatcccatgtaaaaccgttgccccaacatcagatctggaataccacggtgcgggcatataaccagcatccctttaaagcgctcccatgtttcatgcactgtctccactggtctttgtttaaaactcaaaatttcatcaatttgttgagcagtcttattgggtgggtggaacttgttatggaattgcctgactaactcatcccaagttgttatagaatttatgggaagtgagtttagccaagtctgggcagctcttgtcactgagaatggaaacaataacagcttgattgcttcaggagttacgttgggctgcctttgggttttgcagatagagaggaagttcttcaagtgctgctgaggatcttcgacttgcgaccccgaaaatagtcccttgttctgcaacaagtgtagcatgttattcgtaatttggaatgactcagcctgtatctacggaactacaatggttgtggacaaattttcagctatgggttgtgcccagtcatagagagcagcctctggcactattggtaccgctgggttttcctcatgatcccccatgactgtttcgaattgtgcagttgttggttgttgtttgtttttccgattagcccgattcaaggccttgaaaactttctcggaatctgataatgcttcaaatacttcaccagatctcgatgagtttctaggcatgcacttctttcaattgtaattgataacaccattaattccctggcaacgacaccaaaatttgatcacgcccaactatgccttataaaaggacaatgcggacgttgcaaatataacctgagtatttatgcccagagtcgaatccacagagaattaacctatcaattactttcgttggacttactaaattctttagaatcaactttcccaaacgttgtgaataacagttgatgtatatttaataactaagattgaaagtcaataaacagttgtaaactaaatatgcttaagttgtgaacaataatgagaaggttctaaggtagtgattttccctattgatggaatctcttctgtttatgtttcatatagatttaccaatacatctctatcaaccatgaacactctttttactgtgaatctctcccgagtaatcatgataatttactagacgcactctcccgagatacgctagctggctttgtttattacagctcactttagattgcactcaagacttcgttatccctaatcccacctttaaacccgcagttatagatccctcttatactttgggactggtgttgttcaacaatcacctaaatatgcactctctctcgagttatgcatactaaataggcacagctaattgaggatcctgtcaattaactacaacaaacacgtagttgaacaaatagagattaaactggcaaactatattaacataatcaagaagttcatccttcaataggttccatcaaaaccctagacaaaagatttagctactcatgacaatgagtaaataaactctgaaaatattcatgatcaaaattgcaagaaaaataaagagaagaagaaaatatgatgttttgggtgatctctcacacttgtttcttttgccaaagtactttctaaaacattacatgcctcccttggacgagttctattgtttaatatagggttttgggctaaaaatcccgtgttttgcacttcagtccctcaatttttttcgcttcctatcgcggtcctaccgcggttgcgccaggaccgcggtcaactagcctctcagaatccgcaacagccttctgccgcggtcagaccgcggttacgctgggaccgcggcagtccatctccagttctggttttgctgccttcgcgtggtgcacttagcggatattgtaagattggcctctttttctccgtaattgatcccaaaagtactccatagacttcttttattgtatatagcctgcaaagcatgaaaagcactaatcagagcattttgttatcactttttaccataaaaactatacaagaaggtggttctttagggcctaattatagtccaattcacctattatcaggaacggattgtagcaaaggcgaagtcaggttttaaattttatggatttaggattctaatcattttaagttactggaataattcattttaagacaaaaataaggttcgaatcaaagttactggattcggccgaacccgctcccggcgctctagctatctccttggatggtagcacaataagttgctttcaattcactagttgagtcattagtatatacttttcttttatctggcattttttagcataccctattttggatgaaaaacagatatttaatttgaaccgaggaaaaatgtaagctttcaaattttgacctggctaagatttatgtagaacaccttgtcttatcgatatcgggataatttgagatgattgccttcccaaacatttggcatttagcagcaaattggaggaccatgtcttggtaatttttttgataggtcactatgtcttggtaatatgttaactgcaatttttgttaattcccaggatagcatatgcctaagtgtcgatgttgtagtactggtattattgcaatattctaaagtgcccattagtgagttaaactagttggaaatgtaaagtttccttgctggaaagggtaagaggattcttatatgtacaaactgtattgaggtagatagccactggcatacttctccgcgcaaactcatctttggaatgttcattatcataataagtagtcgattaggagaacaactatatcactatagagtatactcttcctcatctttcattcatattttgcgtcctaggacttagatattctagatacccccttatgttgctttttgtgtgtcaggtttacagcattctctgagttgttacctcttctggctgtgggcaccattcctttgttgaaggttgaaaatattagccaagcgattagtacaagcaaccttaccatagagaactcaactacattatcaagcccttttgccacctcttctttcagtgcaaatgctgcctttgaagttcgaagtccgtcaagaatacaggtaaccttttggactgcaatggactgccattgtagtatcttatgcgaagagagaaaaggagcaagtcgcttactacagacaatgagaataattgctgtggtgatgtgactctttggcaaacaaaagcatagatcatcttgataaacttccatattcttgtagactatttccagcttgtgccattattgactataatagtctctctatttcaggttgaattcaaagaagggacagttaatcctccagaggttaagtcaaaaatagacctgccggagaacgttgatatctttggccaaaccataagtttgtcacctatacagcaatctctaggtcctctggaaaatgttgtggcaggtatagcccgagctatttctggtctgcctcctctcaagattccgattccaggtgagaggacgaagtcttggcttattacgacataccttgacaaggatcttcggatctcaagaggagatggtgggctatttgttcttgttaaggaagagagttctcttatagaccagtagcaaggctcgatctcactctgccttccctcccctcaccccatttgtgggattacactgggttttttgttgttgtatactgtataatgatatataaaggtcttaggagcttcatttatacaatatagtatatacgacacattatttgtaaagggagatacatcccacatttttatgtataagatgccatttgtgtagcctttactcacagtggaaggaaccaaaaactggaaatgaacaacatttgcatctaatatgatgttatttt

SEQ ID NO: 80 - DNA, 1263 bp, Nicotiana tabacum
atgtccattttgcactcgccatctctcattttcaacactaaaaccaccattaaaccctactgcctcatttcatttcttccttattcttcaatctcgaactttagatttagaaaatttacaattcattcatccttttcattatttaatgatcctcaagatttttttgtaccaaaatctccgggcaataaactcaaccaaaacgacagcaattctgatgataaacaaatctcatttgttgatgagtggggcgagaggtcggaaccggatacccgacccgtaacgaagttatcagaatcggatcctcctataaatgatgacgaatggggcagaggagctgaattagtggggagcagcaacaatccagtaattgaagatgagtggggtgagaagtcgtatccggagccccggcccgctccgacagtgtcggattcggatcctcctatagacgaagacgaatggatcggagctaagccagttaaaaatgagagcgtttctgataataaaacagcgtcggatccggagacccgacccttaacgagattaccagtttcggatcctccgaaaggtgaagaagagagggttgcagagctgaaaaggtgcttaatggacacggtttatcggacagaatttgggctcagggcctcatcggagattcgggccgaggctctggagctggtttctcagttggaggcagcaaatccaactccgagcccagttgaatcacctgagttgcttgatgggaactggattttagtgtttacagcattctctgagttgttacctcttctggctgtgggcaccattcctttgttgaaggttgaaaatattagccaagcgattagtacaagcaaccttaccatagagaactcaactacattatcaagcccttttgccacctcttctttcagtgcaaatgctgcctttgaagttcgaagtccgtcaagaatacaggttgaattcaaagaagggacagttaatcctccagaggttaagtcaaaaatagacctgccggagaacgttgatatctttggccaaaccataagtttgtcacctatacagcaatctctaggtcctctggaaaatgttgtggcaggtatagcccgagctatttctggtctgcctcctctcaagattccgattccaggtgagaggacgaagtcttggcttattacgacataccttgacaaggatcttcggatctcaagaggagatggtgggctatttgttcttgttaaggaagagagttctcttatagaccagtag

SEQ ID NO: 81 - protein, 420 aa, Nicotiana tabacum
MSILHSPSLIFNTKTTIKPYCLISFLPYSSISNFRFRKFTIHSSFSLFNDPQDFFVPKSPGNKLNQNDSNSDDKQISFVDEWGERSEPDTRPVTKLSESDPPINDDEWGRGAELVGSSNNPVIEDEWGEKSYPEPRPAPTVSDSDPPIDEDEWIGAKPVKNESVSDNKTASDPETRPLTRLPVSDPPKGEEERVAELKRCLMDTVYRTEFGLRASSEIRAEALELVSQLEAANPTPSPVESPELLDGNWILVFTAFSELLPLLAVGTIPLLKVENISQAISTSNLTIENSTTLSSPFATSSFSANAAFEVRSPSRIQVEFKEGTVNPPEVKSKIDLPENVDIFGQTISLSPIQQSLGPLENVVAGIARAISGLPPLKIPIPGERTKSWLITTYLDKDLRISRGDGGLFVLVKEESSLIDQ

SEQ ID NO: 82 - DNA, 2333 bp, Nicotiana tabacum
taattatattggaacataattatatatatattttccatgcagttataaaagccattactatacttgctcgatatctcaaaaacttctcctaagtattatctttcatttttcctaatttttcttttctttattaaaaataagtatgggaaggtatccttgttgcaaattagatgataatgatttgaagaaagggccatggacagaagatgaagatgagaaattgattgattatataaagaaatatggtcacacaaattggcaattaattccaagaaaagcaggtttaaaaagatgtggaaagagttgcagattaaggtggaataattatcttaggcctgatattaagagaggaggattttcacatgaagaagaagaaattatcattaatctccattctgttcttggaaataagtaagtgtcacaatactcttctttcttcctatctgaaatccaattccaaataaataaataaataaataaataaataaataatctcacttattatgaatagttacgtgtagattataattatcttttaaataatatgatggtgtataaaaatatttactcgataatattaaaatttttcaacaaagagatatttttattagatttatttaatttttgaagggcaaatccatctcccatacctgtagtgtactagtatagtctacggtagtaaaatcagaaattttacaaagggtgtataaggtttaataaatatatttatagaaagtaattttaacctatatacataatataattttctatatacgcagtataattttttgatgaatggtgttcaattgaatacccttcactgtatgtggctatgccactgatagtctagtattcctattcttagagttctgttactacctgctgtttcgtttgcttaggctatcttatttttttggttgtggctactgcttctctctcccatggcttcttcactatcgtactatcgtatctctttttcaaaattactgtgattttgctttctttgagccaatggtttatcaaaaacaatagagataaggtctgcgtacatactaccctctccatacctcatttatgagattacattggatatgtcgttgtttgttgttgtaagggcaaatctatcgaatagtttcatattttggaaaaaatatatggatttttcatgttattactactgattatgaacaattacccgcacattatagttatcttttagatgatacgacgatgtaatcgaaatttacaccatcattatgtagtgttaaactctaatttgaaaatttgtggttattatttgtaggtggtcaagaattgcagctcatcttccaggaagaactgataatgaaatcaagaacttctataacacacatttaaagaaaaagcttctcaaattaggaattgaccccaacacacacaaaccaatatctgatcttaattcccttctaaaattttctaatcaatttagctctaactccaaccattttgtttctttagcatctacccttagattacaagcacattttactttactagccaaaatccaacaacttataaactcaaacttattttcatcaattcaaggcaatattttaagcaatccaaatcctctattatttcatgagagccttaaatatgagagtggtcaaccccaattcttggattcctctctagaaaatttcactacaacaattccttgtttggataatactaattcactttccaatgattattcttatatttcaaattcttcggaagtcccgtctgggacatctgataaaattgaaatgatacaaagaagattagcacaatcgttcctgtgcaatgatgacatgcagaaatcgagaaatagttcaaataactttgaattatgtcaagcaaatgaattgaattcaaatgaaaatcaagttgaaggagtacttgcaagagcttctactcaaggaaattgcaactttaatcaaaattttattcccacattttcggaattagatgatattgctgcatgggaaatacctcaggatgatgaagaaattaataccttttggaatactatttttcaatgattttcttatcatgtctagacatccctaaatgttttgatattttaacttccttttttttcccttctgtacaatgttgttaaaaattctttttttttttcgtttgtgtggagagtattattttgatctgtaattgttggaaacctatccatcaatattatgttgccatgtatatacgtctatgttggaactgttttattggctattttcatctcattttccctaaatatttgtaaaaataaagtggaactaatattcattgacggtgtaaat

SEQ ID NO: 83 - DNA, 1029 bp, Nicotiana tabacum
atgggaaggtatccttgttgcaaattagatgataatgatttgaagaaagggccatggacagaagatgaagatgagaaattgattgattatataaagaaatatggtcacacaaattggcaattaattccaagaaaagcaggtttaaaaagatgtggaaagagttgcagattaaggtggaataattatcttaggcctgatattaagagaggaggattttcacatgaagaagaagaaattatcattaatctccattctgttcttggaaataagtggtcaagaattgcagctcatcttccaggaagaactgataatgaaatcaagaacttctataacacacatttaaagaaaaagcttctcaaattaggaattgaccccaacacacacaaaccaatatctgatcttaattcccttctaaaattttctaatcaatttagctctaactccaaccattttgtttctttagcatctacccttagattacaagcacattttactttactagccaaaatccaacaacttataaactcaaacttattttcatcaattcaaggcaatattttaagcaatccaaatcctctattatttcatgagagccttaaatatgagagtggtcaaccccaattcttggattcctctctagaaaatttcactacaacaattccttgtttggataatactaattcactttccaatgattattcttatatttcaaattcttcggaagtcccgtctgggacatctgataaaattgaaatgatacaaagaagattagcacaatcgttcctgtgcaatgatgacatgcagaaatcgagaaatagttcaaataactttgaattatgtcaagcaaatgaattgaattcaaatgaaaatcaagttgaaggagtacttgcaagagcttctactcaaggaaattgcaactttaatcaaaattttattcccacattttcggaattagatgatattgctgcatgggaaatacctcaggatgatgaagaaattaataccttttggaatactatttttcaatga

SEQ ID NO: 84 - protein, 342 aa, Nicotiana tabacum
MGRYPCCKLDDNDLKKGPWTEDEDEKLIDYIKKYGHTNWQLIPRKAGLKRCGKSCRLRWNNYLRPDIKRGGFSHEEEEIIINLHSVLGNKWSRIAAHLPGRTDNEIKNFYNTHLKKKLLKLGIDPNTHKPISDLNSLLKFSNQFSSNSNHFVSLASTLRLQAHFTLLAKIQQLINSNLFSSIQGNILSNPNPLLFHESLKYESGQPQFLDSSLENFTTTIPCLDNTNSLSNDYSYISNSSEVPSGTSDKIEMIQRRLAQSFLCNDDMQKSRNSSNNFELCQANELNSNENQVEGVLARASTQGNCNFNQNFIPTFSELDDIAAWEIPQDDEEINTFWNTIFQ

SEQ ID NO: 85 - DNA, 3108 bp, Nicotiana tabacum
cctataaaaaaccatcctcactcatttgttattactctacacatcttctcatcttcatatacaccaaactaagagtcatcaaaatttgctattagaaaataattaatctttttgaagttttgacaatttcttgtgccaatttaaggcattttaccttgtggggttttaaatttttacttgaatttacttgaatttaccaatttccaagatcttttttcaagggctaagtggggttttggctagaatataaagttctgatttttttgtcagagaagatgattttcttgctccaggggagcattttatcaaagtttatcacaattcttgaattcagtgtagctaaaagtttttatttttggatctttttgattttcaataggtatagaggcacttagttgtccttgaacagaacatttatcggaaacagcctctctaccttaacaaggtaggggtaaggtccgcatatacactatctcctcagaccccacacttctacctccccagaccccacgtgtgagattacactggtctgttgttgtcgtcgttgtacagaggcacttagttttggatattttcttgatttggaacttgagaaattacttaaatgggaggaacatcactgcctccaggatttcgatttcatccaactgatgaggaattggttggatattacctgaaaaggaaaactgatggacttgaaattgaattggaagttattccagtaatagacttgtataagtttgatccttgggaacttccaggtatacattttatttttattgattcgcgtcgaataataaaaatattgactgaatattgagaaaaataattgttgaacaattgcagaacatacattttgtaatctcaattacatttgccaatgatttcccccgaagcgctactccctccgtcccaaaaagattgatacactttggatttctagagtcaaacgagttgttctttgacctgactttttcatatgccttttgaattttctgaattgttaattattacttatgacttatagtagtttttatgtagtttctaaataggtaaatttattacaaaaaatttaaagattctatgttcaaattagccgtcataactacgaatttgactctcgaaacccgaactgtatcattatttttgggacggaggaagtaatattttgtgcatttcgagcttcatgatacttttgaactgaaattaaactggaaagttgttgctttatgacttatatgtttgttcctttattattgtctaaataaaaaagatggagtgttctgtggggcctctctctttcttttttttcatatttgaaagttaaattattagtatctaatttcaaaccctgaccacatattacaagatgaaaagcatatataaagcaatagaagtttctcattataaatggttcatgatttgcttacctgaaatggaaactttaggattctgagatcatgcagagacggatttaggatgggttcagaatttaatatttgttaacgtttttagtagttttagtgttttttaacatttatgtttgtgttctgtgtcgaaaataccgtgttcagttgaaccaacagaatgtaggctctatcgtcctctgacatcttgtcctaaaaaatgcagagaaatcgttcctgccaaagcgcgacatggaatggttcttcttctgtcctcgggataagaagtatccgaatggctcacgaaccaatcgagcgactaagtccggatactggaaagcgacagggaaagacagaaaagttacctgtcatcagcctgaagttgttggatatcgcaagacattagtcttctatcgtggaagagctcctcttggcgatagaacggattgggtaatgcacgagtatcgtctctgtgatgatgtttctcaaggcactccaactttccaggttgattcaacaaactcagtgtttgcttctttaattaactaaatccaagaattcaagaagttgatcatattctgctatgttgaatatgtttaggggccgtttgctctttgtcgtatcatcaaaagaaacgatgcatcactgaaaacaagtgacacttcagtagcagtctcaaatgaacctgttgttcttactgctgagacgcctactcaaacgacgtatatgtccagcgatagcaactattcgactcctatgacttctccttatgaggggactaatgcagcaaacttttggatgtcacatgatatgattcttgattcttcaaaggtattgagattgtttcttttttctatgtatttcaatctggttttttctttgaacttcgtattgattttgttgggtgcaacttaggaatgttctcaaggacagagtactcgtggaaactatctgcattacgacttcccaaacacgacattaacacaaccaaatgatcgatttgaggtcacttcgagttcatctttcccgagttttagaggagaagttgaactttctggcgatctcagtagctatggttgtgtatctccttactcggttcatggaaactacacgggattctatggcaacgacgatatgtcctatgaaggttattattatgatcaagccaactcattcgtaaaatccaaatctttttctaacaaatgaaacggaaaaactaatttagtgttttctgtctttactgcaggatatgaaggttggaatcaagctaatatgggagattttaatggtctatggtcgcacgaagataattttcagtaatttgatgaaaacgtctataagaaagagctcaatgcaactcggtttactttgacaaactctattgttatatgagacaacagatttttatgtttgtctcagagtcattcgattacagcacgtcgagtttagttcccaagttcaatcctagtagctaatatgttttagtacattgttgtcattttaaatattgaaatacctagtgatgatcctttttaatgatcacattaggaaatggtcttagtttgtagctggtttctggttctgatttgtatcacctttctgtttctgatcatttcttataatgtaaccaaaatgtcagtaaactatatgatggacaaatggtttttcccactttttatgaagttgcagttcttgttgtaaa

SEQ ID NO: 86 - DNA, 975 bp, Nicotiana tabacum
atgggaggaacatcactgcctccaggatttcgatttcatccaactgatgaggaattggttggatattacctgaaaaggaaaactgatggacttgaaattgaattggaagttattccagtaatagacttgtataagtttgatccttgggaacttccagagaaatcgttcctgccaaagcgcgacatggaatggttcttcttctgtcctcgggataagaagtatccgaatggctcacgaaccaatcgagcgactaagtccggatactggaaagcgacagggaaagacagaaaagttacctgtcatcagcctgaagttgttggatatcgcaagacattagtcttctatcgtggaagagctcctcttggcgatagaacggattgggtaatgcacgagtatcgtctctgtgatgatgtttctcaaggcactccaactttccaggggccgtttgctctttgtcgtatcatcaaaagaaacgatgcatcactgaaaacaagtgacacttcagtagcagtctcaaatgaacctgttgttcttactgctgagacgcctactcaaacgacgtatatgtccagcgatagcaactattcgactcctatgacttctccttatgaggggactaatgcagcaaacttttggatgtcacatgatatgattcttgattcttcaaaggaatgttctcaaggacagagtactcgtggaaactatctgcattacgacttcccaaacacgacattaacacaaccaaatgatcgatttgaggtcacttcgagttcatctttcccgagttttagaggagaagttgaactttctggcgatctcagtagctatggttgtgtatctccttactcggttcatggaaactacacgggattctatggcaacgacgatatgtcctatgaaggatatgaaggttggaatcaagctaatatgggagattttaatggtctatggtcgcacgaagataattttcagtaa

SEQ ID NO: 87 - protein, 324 aa, Nicotiana tabacum
MGGTSLPPGFRFHPTDEELVGYYLKRKTDGLEIELEVIPVIDLYKFDPWELPEKSFLPKRDMEWFFFCPRDKKYPNGSRTNRATKSGYWKATGKDRKVTCHQPEVVGYRKTLVFYRGRAPLGDRTDWVMHEYRLCDDVSQGTPTFQGPFALCRIIKRNDASLKTSDTSVAVSNEPVVLTAETPTQTTYMSSDSNYSTPMTSPYEGTNAANFWMSHDMILDSSKECSQGQSTRGNYLHYDFPNTTLTQPNDRFEVTSSSSFPSFRGEVELSGDLSSYGCVSPYSVHGNYTGFYGNDDMSYEGYEGWNQANMGDFNGLWSHEDNFQ

SEQ ID NO: 88 - DNA, 3420 bp, Nicotiana tabacum
aaatagtctttctccttaaatagtcaacttaagtggatcctcttcattttatagctcaatctttcttgtttgattcaagcatggagaaccaatactcctactcattctcttcctacttctacttagctatagcactgtttcttcttccaattttaatcacatatattttccatcagagaagaaatctacctccaagtccattttcttttccaataattggtcacctttaccttctcaagaaaactctccatctgactctaacatccttatcagctaaatatggtcctgttttatacctcaagttgggctctatgcctgtggttgttgtgtcctcaccatctgctgttgaagaatgtttaaccaagaatgatatcatattcgcaaataggcccaagaccttggccggtgacaagtttacctacaattatactgtctatgtttgggcaccctatggccaactttggagaattcttcgccgattaactgtcgttgaactcttctcttcacatagcctacagaaatcttctatccttagagatcaagaagttggaatatttatccgttcgttatacaaattctcaaaggatagtagcaaaaaaatcgatttgaccaactggtcttttacttttgttttcaaccttatgaccaaaattattgctgggagacatattgtgaaggaggaagatgctggcaaggaaaagggcatagaaattattgaaaaacttagagggactttcttagtaactatatcgttcttgaatatgtgtgatttcttgccagtattcaggtggattggttacaaagggctggagaagaagatggcctcaattcacaataaaagaaatgaattcttgaacagcttgcttgatgaatttcgacacaagaaaagtagtgttacacaatctaatactattgttggaaacatggagaagaaaaccacactgatcgaaaatctcttgtctcttcaagaatcagagcctgaattctacacagatgatatcatcaaaagtattatgctggttggtatcctgttattttggccttcttgtagaaaataaaagaaaaataaaaaaaattaaactttaatctaattttgatgtgactgcttatattttgaatagatatagattcttatcgtgtggacttcttttctctgttgtcactttcaaaaacttgaattccatgtgcatctcatctaggattgattagtcaatacttgtctcttaaagtagatatattcaaaattagtgctctcatttcattctttttaattggtcatttccttctgtttagattattattatatagtcctcattttgatagatggtgcgcatatattttctgatgagtgttgtatgtggatgaactttctactcttctctaaaagtttatttattcttatgtgaacaggacctattataatttaaggtacagaattggcttatcagagtaagagtaaagcctctttttactttgatgcatgattgcatttgcttggcaataagcagcctaatctcgacttgttagaactaattttaataggggtgacaaatgggttgttttgactcttttgggttggtctagatgaaacgactcattaaataagtccaaccatgtccaaagtttatatgggtcaagatgggctatacaataggttgtaacccaacctacctaaattgacccaaatcttttgtaatattccaacttttaaacaagcatgtaaaagttgttttgtgttttggagtaaatgtcaatttatgcataatgatttctttcctcagtttaaatttagaactttatttgatagttctttatcttataatactaacaaagatctgaataataaaaaaatagtaaaattagaactttctacccaacacaacccacttcccaccaccccaacccccaccctacacctgtacctccctacccctattattttttttattttttatgttgtaggtagagtatatttttttatttaaacaaaatgaatatttttgagaagactagcataaaaaaattattttcttttgaaaatattttcgattctctaaccaaacactagaaaatatttttcggaattttttttttcactcaccaatcaaacatgagaaaataagtgataaaatcacttcatatcaaaacacatccttagaagctttaaaagacaattgttgttcatgggcaagtttgggcttaaatcatggactgatttgggctatagaaaacaaatgagtttagttgggtcgtgcaaaaacttatcccatcattaaagtagctcatgcccaacccattaaaacctggataggtcagatgggtttgtgccacttttgccacccctaattttaattctacttgtcctttgtaaaatggtaaacttcgtttgtatttctgagatattaattgagcacttgaaaatgaagtccgactaatatattattcaaataaaaattgtatatgtatgttaacataaaaggtagatcctttaaattttttatgatggccacatttattttgttgtaggtagtttttattgcaggaacagagacctcatcaacaaccatccaatgggtaataaggcttcttgtagctcaccctgaggcattatataagctacgagttgacattgaaaacaaagttgggaacaagcacttgctgaacgaatctgacctcaacaagcttccgtatttgtattgcgttgttaatgagacaatgagattataccctccgataccacttctattgcctcatttttcaactgaagattgtattgttggaggatatgatgtaccaaaacatacaatgctatttgtcaacgcttgggccattcacagggatcccaaggtatgggaggagcctgacaagtttaagccagaaagatttgagtcaacggaaggggaaacagaaaggttaaattacaagcttgtaccatttggaatgggaagaagagcgtgccctggagctgatatgggattgcgagcagtttctttggcattaggtgcacttattcaatgttttgactggcaaattggggaagaagaaagcttggaggaaagctataattctagaatgactatgcagaacaagcccttaaaggctgtctgcactccacacgaagatcttgtccagcttctatcacatctctgaggcaatttgtctatgccaaatgtaaacttctatacccactatattgcacgcgtatgatttgacactctttacaaggtatttgtcactattctgttttgctatttttgtgaaaagttaatcaacaatggatgataaataagtagttgttcaaaggttatgttaataaagagtaaatgccggagagaagaaatctattacaagatgttttgctttctctgagtagtatttggtatcttgaataaaaatgataaatgtttgatctgaacttgt

SEQ ID NO: 89 - DNA, 1563 bp, Nicotiana tabacum
atggagaaccaatactcctactcattctcttcctacttctacttagctatagcactgtttcttcttccaattttaatcacatatattttccatcagagaagaaatctacctccaagtccattttcttttccaataattggtcacctttaccttctcaagaaaactctccatctgactctaacatccttatcagctaaatatggtcctgttttatacctcaagttgggctctatgcctgtggttgttgtgtcctcaccatctgctgttgaagaatgtttaaccaagaatgatatcatattcgcaaataggcccaagaccttggccggtgacaagtttacctacaattatactgtctatgtttgggcaccctatggccaactttggagaattcttcgccgattaactgtcgttgaactcttctcttcacatagcctacagaaatcttctatccttagagatcaagaagttggaatatttatccgttcgttatacaaattctcaaaggatagtagcaaaaaaatcgatttgaccaactggtcttttacttttgttttcaaccttatgaccaaaattattgctgggagacatattgtgaaggaggaagatgctggcaaggaaaagggcatagaaattattgaaaaacttagagggactttcttagtaactatatcgttcttgaatatgtgtgatttcttgccagtattcaggtggattggttacaaagggctggagaagaagatggcctcaattcacaataaaagaaatgaattcttgaacagcttgcttgatgaatttcgacacaagaaaagtagtgttacacaatctaatactattgttggaaacatggagaagaaaaccacactgatcgaaaatctcttgtctcttcaagaatcagagcctgaattctacacagatgatatcatcaaaagtattatgctggtagtttttattgcaggaacagagacctcatcaacaaccatccaatgggtaataaggcttcttgtagctcaccctgaggcattatataagctacgagttgacattgaaaacaaagttgggaacaagcacttgctgaacgaatctgacctcaacaagcttccgtatttgtattgcgttgttaatgagacaatgagattataccctccgataccacttctattgcctcatttttcaactgaagattgtattgttggaggatatgatgtaccaaaacatacaatgctatttgtcaacgcttgggccattcacagggatcccaaggtatgggaggagcctgacaagtttaagccagaaagatttgagtcaacggaaggggaaacagaaaggttaaattacaagcttgtaccatttggaatgggaagaagagcgtgccctggagctgatatgggattgcgagcagtttctttggcattaggtgcacttattcaatgttttgactggcaaattggggaagaagaaagcttggaggaaagctataattctagaatgactatgcagaacaagcccttaaaggctgtctgcactccacacgaagatcttgtccagcttctatcacatctctga

SEQ ID NO: 90 - protein, 520 aa, Nicotiana tabacum
MENQYSYSFSSYFYLAIALFLLPILITYIFHQRRNLPPSPFSFPIIGHLYLLKKTLHLTLTSLSAKYGPVLYLKLGSMPVVVVSSPSAVEECLTKNDIIFANRPKTLAGDKFTYNYTVYVWAPYGQLWRILRRLTVVELFSSHSLQKSSILRDQEVGIFIRSLYKFSKDSSKKIDLTNWSFTFVFNLMTKIIAGRHIVKEEDAGKEKGIEIIEKLRGTFLVTISFLNMCDFLPVFRWIGYKGLEKKMASIHNKRNEFLNSLLDEFRHKKSSVTQSNTIVGNMEKKTTLIENLLSLQESEPEFYTDDIIKSIMLVVFIAGTETSSTTIQWVIRLLVAHPEALYKLRVDIENKVGNKHLLNESDLNKLPYLYCVVNETMRLYPPIPLLLPHFSTEDCIVGGYDVPKHTMLFVNAWAIHRDPKVWEEPDKFKPERFESTEGETERLNYKLVPFGMGRRACPGADMGLRAVSLALGALIQCFDWQIGEEESLEESYNSRMTMQNKPLKAVCTPHEDLVQLLSHL

SEQ ID NO: 91 - DNA, 4056 bp, Nicotiana tabacum
  misc_feature (2610)..(2612): n is a, c, g, or t
gtttgaacttagtagttttcgtttaaattttatatttattttaaaatatatattaaatatgtacaaattattaatttaaaattcaataatattaaatttcaaacccaaacttcaaattgtaacacatcattttaacacgtctccgagtaggggataggagaaaaagttgaaagaaactcaccaagttatttttctaatttccaactaaaatattatccaatgctaaatagtgtctccttaaatagtcaacttaagtggttcttcttcattttatagctcaatctttcttgtttgattcaaccatggagaaccaatactcctactcattctcttcctacttctacttagctatagcactgtttcttcttccaactttaatcaaatatattttccatcagagaagaaatctacctccaagtccattttcttttccaataattggtcacctttaccttctcaagaaaactctccatctgactctaacatccttatcagctaaatatggtcctgttttatacctcaagttgggctctatgcctgtgattgttgtgtcctcaccatctgctgttgaagaatgtttaaccaagaatgatatcgtattcgcaaataggcccaagaccatggccggtgacaagtttacctacaattatactgtctatgtttgggcaccctatggccaactttggagaattcttcgccgattaactgtcgttgaactcttctcttcacatagcctacagaaatcttctatccttagagatcaagaagttggaatatttatccgttcgttatacaaattctcaaaggatagtagcaaaaatatcgatttgaccaactggtcttttacttttgttttcaaccttatgaccaaaattattgctggcagacatattgtgaaggaggaagatgctggcaaggaaaagggcatagaaattattgaaaaacttagagggactttcttagtaactatatcgttcttgaatatgtgtgatttcttgccagtattcaggtggattggttacaaagggctggagaagaagatggcctcaattcacaataaaagaaatgaattcttgaacagcttgcttgatgaatttcgacacaagaaaagtagtgttacacaatctaatactactgttggaaacagggagaagaaaaccacgctgatcgaaaatctcttgtctcttcaagaatcagagcctgaattctacacagatgatatcatcaaaagtattatgctggttggtatcctgttattttggccttcttcttttagaaaataaaagaaaaataaaaaaattaaactttcatctaagtttgatgtgactgcttacatttagagtagatatatactcttatcatgcggacttcttttctttgttgtcactttcaaaaacgtgaattccatgtgcatctcatctaggattgattagtcaatacttgtctcttaaagtagatatattcaaaattagtgctctcatttcattctttttaattggtcttttccctctgtttagattattattatatagtcctcattttgattgatgcatgattgcatttgcttggcaataagcagcctaatctcgacttgttagagctaattttaataggtgtgacaaatgggttgttttgactgtttttgggttggtctagatggaacgactcattaaataagtccaaccctttccaaagtttacatgggtcaagatgggctatacaatggattgtaacccaacctatctaaattgacccaaatctttgtaatattcccaatttttaaacaagcatgtaaaagttgttttgtgttttgaagtaaatgtcagtttatgcataatgatttctttcctcagtttaaatttagaactttatttgatagttctttatcttataatactaacaaagatctgaataataaaaaaaaatagtaaaattagaactttctacccaacccaacccacctcccaccaccccaattcccaccctacacctgtacctccctatccctattcactttttattttttatgttgtagatagagtatatttttttatttaaacaaaatgaatattttttacgatttagaaaaaaaaattctttcgtttcaacaaagcaagtattttcttttcgtgatatagaaaaagtattttctttttcataaaatgagtacttttttcatgttgtagaaacagtattttcttttattttaataaaaaaaatacttttttcatgatgtagaaaaaatattttctttttcacaaaatgagtattttcttttcctgttgtagaaaagtattttcttttattacaacaaaaaaaatactttcgtttcatgctgtagaaaagtattttctttcatttcgataaatgagtactttcttttcatattatagaaagaatacttttgttttgtttcgacaagaaaaagaatattttcttttcagctataaagctcaaatctcaatgttgttcttatgagaaaaagtaaagcatcacttagtttctttggatttgtgtggattttttaaaaaactaattgaattcttgaagaatatagaatgttgaaaacgttgggtatttgggaggaagaagggggggggggggggggcnnnggggggggggtcaaaggaaacatggggatttgggtggagtgagttgagaaaagtagcataaaaaattattttcttttgaaaatattttcgattctttaaccaaacactagaaaatatttttcggaaaaaaatttccactcaccaatcaaacatgagaaaataagtgataaaatcacttcatatcaaaacacatccttagaagctgtaaaagacaattgttgttcgtgggcaagtttgggcttaaatcatgggctgatttgggctactgaaaacaaatgagtttagttgggtcgtgccaaaacttatcccatcattaaagtagctcatgtccaacccattaaaacctggatgggtcaaatgggtttgtgccacttttgccacccataattttaattctacttgtttttgtaaaatggtaaacttcgtttgtatttccgagattttaaatgagcacatgaacatgaagtccgacaaatatattattcaaatataaattgtatatgtatgttaacataaaaatagatcctttaaatttttatgatggccacatttattttgttgcaggtagtttttattgcaggaacagagacctcatcaacaaccatccaatgggtaataaggcttcttgtagctcaccctgacacattatataagctacgagctgacattgacaacaaagttgggaacaaacgcttgctgaacgaatctgacctcaacaagcttccgtatttgtattgcgttgttaatgagacaatgagattatatcctccggtaccacttctattgcctcatttttcaactgaagattgtattgttggaggatatgatgtaccaaaaaatacattgctatttgttaacgcttgggccattcacagggatcccaaggtatgggaggagcctgacaagtttaagccagaaagatttgaggcaacggaaggagaaacagaaaggttcaattataagtttgtaccatttggaatgggaagaagagcgtgccctggagctgatatgggattgcgagcagtttctttagcattaggtgcacttattcaatgctttgactggcaaattggggaaacagaaagcttggaggaaagctataattctagaatgactatgcaaaacaagcctttaaaggctgtctgcactccgcgcgaagatcttgtccagcatctatccaacctctgaggcaatttgtctatgccaaatgtaaacttctatacccactatgctacacacgtatgatttgatgctctttataaggtatttgtcactattctgttctgctatttttgtgaaaagttaatcaacaatggatgataaataagaaataattcaaaggttatgttaataaagagtaaatgccggagagaaaaaatcgattacaagatgttttactttctcttagtagtatttcgtatcttgaataaaaatgatgaatgtt

SEQ ID NO: 92 - DNA, 1563 bp, Nicotiana tabacum
atggagaaccaatactcctactcattctcttcctacttctacttagctatagcactgtttcttcttccaactttaatcaaatatattttccatcagagaagaaatctacctccaagtccattttcttttccaataattggtcacctttaccttctcaagaaaactctccatctgactctaacatccttatcagctaaatatggtcctgttttatacctcaagttgggctctatgcctgtgattgttgtgtcctcaccatctgctgttgaagaatgtttaaccaagaatgatatcgtattcgcaaataggcccaagaccatggccggtgacaagtttacctacaattatactgtctatgtttgggcaccctatggccaactttggagaattcttcgccgattaactgtcgttgaactcttctcttcacatagcctacagaaatcttctatccttagagatcaagaagttggaatatttatccgttcgttatacaaattctcaaaggatagtagcaaaaatatcgatttgaccaactggtcttttacttttgttttcaaccttatgaccaaaattattgctggcagacatattgtgaaggaggaagatgctggcaaggaaaagggcatagaaattattgaaaaacttagagggactttcttagtaactatatcgttcttgaatatgtgtgatttcttgccagtattcaggtggattggttacaaagggctggagaagaagatggcctcaattcacaataaaagaaatgaattcttgaacagcttgcttgatgaatttcgacacaagaaaagtagtgttacacaatctaatactactgttggaaacagggagaagaaaaccacgctgatcgaaaatctcttgtctcttcaagaatcagagcctgaattctacacagatgatatcatcaaaagtattatgctggtagtttttattgcaggaacagagacctcatcaacaaccatccaatgggtaataaggcttcttgtagctcaccctgacacattatataagctacgagctgacattgacaacaaagttgggaacaaacgcttgctgaacgaatctgacctcaacaagcttccgtatttgtattgcgttgttaatgagacaatgagattatatcctccggtaccacttctattgcctcatttttcaactgaagattgtattgttggaggatatgatgtaccaaaaaatacattgctatttgttaacgcttgggccattcacagggatcccaaggtatgggaggagcctgacaagtttaagccagaaagatttgaggcaacggaaggagaaacagaaaggttcaattataagtttgtaccatttggaatgggaagaagagcgtgccctggagctgatatgggattgcgagcagtttctttagcattaggtgcacttattcaatgctttgactggcaaattggggaaacagaaagcttggaggaaagctataattctagaatgactatgcaaaacaagcctttaaaggctgtctgcactccgcgcgaagatcttgtccagcatctatccaacctctga

SEQ ID NO: 93 - protein, 520 aa, Nicotiana tabacum
MENQYSYSFSSYFYLAIALFLLPTLIKYIFHQRRNLPPSPFSFPIIGHLYLLKKTLHLTLTSLSAKYGPVLYLKLGSMPVIVVSSPSAVEECLTKNDIVFANRPKTMAGDKFTYNYTVYVWAPYGQLWRILRRLTVVELFSSHSLQKSSILRDQEVGIFIRSLYKFSKDSSKNIDLTNWSFTFVFNLMTKIIAGRHIVKEEDAGKEKGIEIIEKLRGTFLVTISFLNMCDFLPVFRWIGYKGLEKKMASIHNKRNEFLNSLLDEFRHKKSSVTQSNTTVGNREKKTTLIENLLSLQESEPEFYTDDIIKSIMLVVFIAGTETSSTTIQWVIRLLVAHPDTLYKLRADIDNKVGNKRLLNESDLNKLPYLYCVVNETMRLYPPVPLLLPHFSTEDCIVGGYDVPKNTLLFVNAWAIHRDPKVWEEPDKFKPERFEATEGETERFNYKFVPFGMGRRACPGADMGLRAVSLALGALIQCFDWQIGETESLEESYNSRMTMQNKPLKAVCTPREDLVQHLSNL

SEQ ID NO: 94 - DNA, 10890 bp, Nicotiana tabacum
  misc_feature (7071)..(7080): n is a, c, g, or t
aaacaatcaacaaaattaatcatcaacacaatcgaacagaagaagacaaagccatcgaaacttcaccttctcttactgcaaatcctcggaacagcgacacacttttgtccccaatttttctctctccaaatttacctccttaatttcccaaaatttggggatttcttatttggtcgtttttaaccccaatttatattcaatctttatttttttccttctaattttgaggtttaccagctgggtactgtaatttaaactgggattggctgtaattggagttttactgcagttaaagctgacccagttcttcaagattcactagtctttgtttaatttccacggtaactaacaaattcaccattttttagattctgtggcttttggattatttttcatgtttaatttgttattgggtgttttgggttgcttttttctctttatgtttgcataattctgtatgtgaattcataaaatgaactatatttacactagctgtagacctactgcaaccgtgttacagcttgtattgtattgttattttatatacaatgttggttttgattgttacttaaattgtattattaaatccattgttgtgacacagctgaaggatcccattttatgtaatgatggatttggtgtgattggatcattatgttgttctgtatgtggagtccatttttgtattgtattgttattttaaatacaatgttggttgtgattgttacttaatttaattgtattgtattattaaatctattgttatgaagcagcggaaagactccattttacataatgttgttctgtatgtggattcataaaatggactatgtttatactggctgttgacatactgcaacccttttagggttttactttatctatgtgaaaccaaggtctttctatgtgatgaaggactttctagtattcaaaaatgggtacaatggagtggaggatttggattgaggcttagttgattgacttgaactttatgcttttgcgagttagttttccttttgaaagttgggagattgttataagttaatagggaatttgtttgaatggatactcgagcttggtgaatatcgccgattaattccaattatccggtgatgtttgacaattttatggagcccgggttacggtaggcgggcagccagcgttaaactaaccagtttcatgatgaatcctcacgttagatgagtttaaatgttagaaaagttgtcagcaaggattcatatagacaaccccaactagtttgggactgaggtgtagttgttgctgttgttgacttgttgttgtctgtgtttgtctatgttgatctgtggtacttttggtctattcggttacttttgacaatttcatgtgtagaatatttatcaggtagaaagtgatttaaaactaatttttgatgcatatatgtgtatgtgcacgacagaatggtttgaggaatttttgacgtagtagtgcagtcgagccatgggtagcagtgagatggataaatcctcaaaggaggcaaaggaagcaaaagagccgaagactcccaattcacaggtaactggttggtgctaagagagaatactgtgtgttctatagataactggtaaagttgatagatgttagtggatgacgcgggttgagacatataaacaactttgacatacttttggtactggcttggtgttcagtaatagaacttttgtaccaaaaacaaaaaaccatttttttccctgaacaagtatttttgtgtgagttcttttaatcatcccaccaattaatgtgttttgcttcttggcactatataggagcaggcttctactactaccgccggctcagtcaatccagattggtctggctttcaggtatggtttctctgtagcatattttctcagccttttgcctcatttattggcatttctttgttggtagtctaaggacattgatgatcaaaatgcaggcatattctcctatgcctccacatgggtttatggcatcaagtcctcaagcacacccttatatgtggggagttcaggtatggaaatttcacatatgacgtggctctgattcacatgctgttttgaatttctttcaaaagtccgatctaattagcattacaataagctagtatcagcacacggatttcaggataggttctgacttttgaatcaagaagcattacattaagctagttagaatgcgtattgattcaattacataccccctggtctgcaagagttaaaaaagaaagagatgatttaagttcgttatatttcactctttcatgatttgtttatgatgagtgtggctctatgatgatctgataactcattcttggggtttcatcttgtctgctagtgattcgtttatgggcttggatactatgctttctacttcctctgtttcattttgtgtcgtagtttgaccgaacacggagtttaagaaagtaaggaagacttttgaatcttatggccttacgatgtatcaaaatgccgtttaatcgtgtggtcttaaacatgccatgtaggatgttggaattgaagagttactaaatatagaaagtggcatcaaaatccccagaccccatgcatagcgggagcttaatgcaccgggctgcctttttttttttttactgaaaaggaaagtaagacacataaattgaaatggagggagtaataaatatttgcgagatgatacccttttttggtgaggaaggaatctattatggacattataaatcccgttttttatcagcattctctttacttggctgatcgcttatgaatttagttatagaagcattcttagcttaagctattttttggtgcgttgaattaatttaagcgagaaagactgcggtatgcttcagttgtcttttaatcggcgtgcttatagataatatatcgaagtggttcataaacttgattaaaattatgggaaaggtttgagctttgaggttcgaacctgttaaatagggtcaaagatgtattagattgtggttttagtattcgatgttggtaatttccaattttggtctttgtggcatgcaaataaacacatctactgttcaattaataggattgtgcatttggcccttcctctaatatgttttctaaaatttattgtatttttaaacttaaccatgagatgacttatcttttatgttaagagagaattagttttgtcccttgactctttattttaagtccaaaatcagtaaacttgtttcctcagagtaaaaaaagctgattttaagaaaacttttcattaaaaaagcatataatactatcgatcaaatgtcaaatattcagatttcactgagacctagactgaaatttgttaatgagggaccaaaagtacaattatcccttttggatagattatatgtttaaattgtgtcaaattagcaggagatacctttcacttagaaaagggttgtaaagcagcttcttgagttcgcttggagcgattgcttcacaacctgaataaagcagcttgtctttctcttttaaatgctttaaaacgagctatatggcttgttgttcaagctaaatctctttttcccctccgcctcttcttctaatttgagttcaaaggtattgtagtggtaccaaattgtcacttacatagagaagagcagtaaagcaatttaaagtgctcagactgcgtttttttaacctttgctactacagcatagctggcacaaattgaataaagcaggttgttacgatgtaatagcttgtctaatgctttttataggggaaaaagtgactgatgatagatctctatggcgttctttcattatgttattatctttttattgtgaaattagcataattatggtactatcaaaagaaataagtacaggtaaggtggttcttctgttgcatctgtgtgttttgcaagcgatgctttcatcatacgcttctgcatttggatctggatatcatgaaaatatgtaattatgttgtttgctttatgcacatttctacttgcatgattttctagagtatgactaatctcgagtctcaagcggcaaaacttgctggcttcgtgcattttgaagaatatgatgtgtcaatttgctaccaccttgtgcagatgtgtgcctcctgaaaatttcatgtgtggaatgtacatagctttctttgctaagttgccaatgacttgtactgatcctaaattgtcaagaagaaaaagacttggtataaattctgtggtctcgctcaagcagttctttggatagcattcaccgtttcacaagtgttaatatggttaactgaaaggatgaaaatttattccagactgcatatttcgtattacaggattaccgagaacaagagcaattgaggcttttatttcaagtcatcatcaaagcctctcaatttttcttctgaaatcttgatgaataagttaatgatgcttctgtacaacaattctgctggtttctttttactccatctccatggattgtgaaagtgtaaagattattctgatgaatcttcaagcatgtggataatagtgccaaaatttagtatttcttttgtatggattatcttttaatctgatttttgtggtttatatttccttgcttttgtctgtggttctattttacaagttgctacgcagtttgtggttctattttatctctgtattttcacagtagcagcccgatactgttttaataaaatttgaccttgtcaaaaaaacaaaaatatttctttaacaattttggcggctggtttttcagcaatttatgccaccctatggaactccaccacatccatacgttgcaatgtatccccatggcggcatatatgctcatccatcaatgcctccggtataatcttgttgcctgatgtttactgtcttactaactatatgcatctcagttctgattttgctaacttgaaactgatattttccaaattaatcagggatcttaccctttcagcccttttgcgatggcttccccaaatggtgtcactgaagctgcagtgagtacctacgctgaatgtgttgaataactttgtccacgtaatcaatgttttaagtttccagttctcatattgcttccttcatttttccttatgcaggttagcaaccctggtaatgctgaagtagatggtaagtcatccgagggaaaggaaaaattgcccattaagagatctaagggaagcttgggtagtttgaatatgatcaccgggaagaacaatggacctggtaagacatctggagcatctgccaatggagtctattctaaaaggtatgatgcataatatgaaagttctcagaatattggaaattataatataagcagaagaatttagaatggttattaaatgggcacttacagcgaaagtagattaattgggcacttacagtccaaattgccttattaattttttctggtcgatcaacttcagcttatcttctcgtctgagacttttataaattgaataatgtaaatcaagccaaatgtgacttcttggttttgtgggctctacttagtatgcatttccgattgggcacttacagcgaaagtagattaattgggcacttacagtccaaattgccttattaattttttctcgtcgatcaacttcagcttatcttctcgtctgagacttttataaattgaataatgtaaatcaagccaaatgtgacttcttggttttgtggactctacttagtatgcatttccgattgagcggattctagtcatcagatggttgtaagtcatgctccatatttcccagtttagctattgttagcacttcctgaatgccgtaagggttggctggaataagcagtgttgtaaacacgtttttaagttaaaagagtagggcttcctgtctggggtggatgtagtgttctaccgacgggttcaattgaacccataactttcgatgcggagtaaaaatttatttgtaaaaattcactaaaattgcaaaaatagtagatatgaatccataactttaaaaatataatgagttcaatgctaaaaaccttaaaagttgaatccatagtgtttaaatcctggatcctttcggggttgaaggcgtaagcgccgcctctgcttccggttggaatgatgtgttcttctcatgtatggttttctgatacatactgttttgcaatctttttagcttttgctgagcaagataattgctgtccaggaatctaaaatatacttattggttaggttgaatacagaaatattttggagtatcagatatattaatatatttgttgctaatcatgatattttctatccatgtgagaatgcttttttgcttaaagtatttcgagttgtcaagcctaaatacttccctatcagttcatgagacttatgacctgtgccaatgttggacttgtagtgccgagagtggaagtgaagggtcaagtgaaggaagtgacgcaaattctcagaatgtgggtattgtatgatgtattttgttttatttcaattattatatggtagaaggtagttttttatttcctgtttatgggaagtatgataaacatgctttccatcttaaagcaatggcttcaggcttgtctgtgctttgtacaattcaacatagagggtgtttggctaagcttataagcacttttcggcttatttagttgtttggtaagttaaaagtgcttataagtcaaaaatacgccaaaagccataagttggtcacctccaacttatgaatttttagcttataagcactttaagtttgaccaagatttttattattttatccttaaaatatgacaagaggggttgctctgatggtaagcaacccccacttccaacctagaggttgtgagttcgagtcttcccaagagcaaggtgggaagttcttggagggaaggatgccgggggtctatttggaaacagtctctctaccctaggataggggtaaggtctgcgtacacactaccctccccagaccccactaagtgggattatactgggttgttgttgttgttgttgtatccttaaaatattcccttttagaacaaaactcctacatcaatgctcactgcctcaagtattttttcaacctaacccccccnnnnnnnnnntgcaattctcattgactatttaatagaagcaaattctctattcctttgcatatttgtatctatgtgattgtttattaatctttgaactgtatgtaataaatgaggacatatcaaatttttggtgtattgctttccaagtgttgtggtgatgaagatagtgtttgtttctcttcaaataatttgtcctattaggtttattttttattgagaaacttttgtcaatttattaattattataacttatgattatatgattatcataaaataaattatatttatcataaaaattatcttagctaagcacggttgtatttaaaataaaatgacaaatagaatattttgtatttgaatcgatctggaatctaaaattttgaagaaattacgcccttacaagtgtaaacagttctaaggttatttaagtcattttaacagaaaaagagcttatcagcactttttaatcaaatactgcaacaacttattgtcaatttaagcacttgtatcgaaacacgtaactgcttatttattagatcaatttcagcacttaaaagtgtttttcagcacctaatgcttatcagctacttcaaatcagctaatccaaacgggctctaagtgtttggaaagatgtgctgaagccgataataatcaattgatgtgtttggtagaaaactactaataagttgttcttttattaaaatgactaaaatatccttaaaaaagttacaaaatattataaattaaaaagtttctttgtaaagaaaaggatgaacaacgaatatggaatgaaaagaaagttagaaaatttatttagggaaaatattttgtgaattaaaaaatattattaaggataaactagtaaaattcttggtcaaactaaaaatgcttataagctaaaaaactataagttgggggtgaccaacttatgacctatggccgattttagcttataagcacttggctcataagcactttaggtatttgccaaacgcgtagataagccaaaaaagtgtttataagccagtttgaccagcttataagcctagccaaacaccctcatagtcagttatgcgtgtgtgcgtgtgcgtgtgtgtattacagggaaaagctaactcattgttatttcagtatgtcctttggttcgtcgagccagtatctgattgtttgtcatattgattttgtaggagtcaccaatgaattcaggaggcgggcaagattcaggtctggtgatatgaatttgctttgaatatgtggtaactattttggggatgaatatatttgatgtaaaagtagtatgatgtctctgctacagctgacacatctcaaaatggaaatgctgcacatggttcccagaatggagggactggcggcgctcctcattcaatgattaaccaaactatggcaatcgccccgatatcagctgctgcggcgggaggtattcctggacccacaaccaacttgaatattggtatggattactggggtgctgccaccgcatcatctattcctgcaatacacggaaatgtaccttctgcttcagttgctggagggttggttgctgctggatcacgagatagcgctcaatcacatatttggattcaggtatcctttttgtctctccatttgttaagaactcatgattctgtatgttgaattgtaagcgagtctattgcagctagattcacatatgtagataactatgatttatgtccacataaaacacacttaaaagagcacgtgttttagttacatgagtgaagtatggactaaaatattcacactgatataggctttgttgatgacttaatgcacatatatgtgcatgggatggtttgatctgagttaggatacggagttggaggagaacaccagagtccaagatctccatgaattctattattttacttcagtcattatgtgttgaacagaagcataagctttactactaaaatatcaccctgcctctacccaagatcccagcgtcacaactccattttttgatcaaattgcgaagtaaatgggcttctaatgaggtgtcatccttgccgttcgctcagtgttgagcacctagaagatcatctgatttctccgcaaccatttttgtcatattaattttctgcttttcttcctttttaactgaggatgtctcttttaacatagtgtttcttctctttctggatagttaatgcattgtcactgacgatcttttctttgcgattgaattcaggacgaaagggagcttaagcggcagagaagaaaacagtccaacagggaatctgctcgtcgatctaggttacgaaagcaggtacaaataatccttcagttttttcctttttcaatcataattaaccctgactccacttcgccttttgtgagccaggcagagtgtgatgaacttgcgcagcgtgctgaagttctaagggaagaaaattcctctcttagagctgaagtgagtcgtatcaggagtgagtatgagcaacttcttgctcagaatgcatctcttaaggtttctctctctacccttcttcggttcgcccaatacacactaataaataatgaagttcaggacatagtaaatagttaagccaaggatgaaagatcaaattataaatgtttatcaggacggagtacatctaatcctttatctctccgtaagcgtctcacttaattaatactccactggtggaacaatatgagcagatctggaaaaattaataaattgacttttttttctaatcccgtcaaatatttgaaacaaattcagtttgcaaaaattacttatatttgaatcggaggcagtaattttttgggccttttttcatttttgtcccattgggtgaaattaattacagccgctagccactgatatgtatataatatgtataattatacttaatatacaaaacatttacattttccggctactattttggagggcggcccaataaggtaattatccctaagttttatgctatttaagtcattggatttgactttgcaggagagacttggggaagttccaggggaagatgatccaagaactagtcgagatgaccaacttctgggcaaaaaagcccagcattcttcacaaaaggagtccgagcagggtagctaatgacgttctggctgcagtaatgtggattaatgattaggagcttaacctaacaaactttgtaatagcaagggtttgatctgcattgagtagtagtttataactcgcgaaaggtcaccatgctagtgttatcaggatctgtatgtccaacactgtccatcgtttctctgttgaaccaatcttttatggtcgagaaacctggataatatgtagagaatgtgatcgtcgcagtggttctgttccagcagtgtgcagggaaatgtctattttttcctcaaatttgtatctactaatatggttgaccagtactgatccaaatgctgatccatggggtttttgttttggttactaaaagtgcttctttgctcgctggcagtgcctctgactcgggttttggcagtaggattcactgaggtgacgaaagctgaatccaaggttctttgccgcgctccatagattcttgtggattatgggtgtattttttattcagcctcttgttaggtcaaaaaatatttgtagtaataactactgatacaatttgtgtgtatttcaacccttttagtattttcagttcccccttccctaggaatctctcttctgcatgtccttgtttgaggattgtttaattgaattatgaaacatttttcccgagctgggaactaatgaggggcagccatagcttgaatctttccttctcccagaaa

SEQ ID NO: 95 - DNA, 1236 bp, Nicotiana tabacum
atgggtagcagtgagatggataaatcctcaaaggaggcaaaggaagcaaaagagccgaagactcccaattcacaggagcaggcttctactactaccgccggctcagtcaatccagattggtctggctttcaggcatattctcctatgcctccacatgggtttatggcatcaagtcctcaagcacacccttatatgtggggagttcagcaatttatgccaccctatggaactccaccacatccatacgttgcaatgtatccccatggcggcatatatgctcatccatcaatgcctccgggatcttaccctttcagcccttttgcgatggcttccccaaatggtgtcactgaagctgcagttagcaaccctggtaatgctgaagtagatggtaagtcatccgagggaaaggaaaaattgcccattaagagatctaagggaagcttgggtagtttgaatatgatcaccgggaagaacaatggacctggtaagacatctggagcatctgccaatggagtctattctaaaagtgccgagagtggaagtgaagggtcaagtgaaggaagtgacgcaaattctcagaatgtgggtattgagtcaccaatgaattcaggaggcgggcaagattcagctgacacatctcaaaatggaaatgctgcacatggttcccagaatggagggactggcggcgctcctcattcaatgattaaccaaactatggcaatcgccccgatatcagctgctgcggcgggaggtattcctggacccacaaccaacttgaatattggtatggattactggggtgctgccaccgcatcatctattcctgcaatacacggaaatgtaccttctgcttcagttgctggagggttggttgctgctggatcacgagatagcgctcaatcacatatttggattcaggacgaaagggagcttaagcggcagagaagaaaacagtccaacagggaatctgctcgtcgatctaggttacgaaagcaggcagagtgtgatgaacttgcgcagcgtgctgaagttctaagggaagaaaattcctctcttagagctgaagtgagtcgtatcaggagtgagtatgagcaacttcttgctcagaatgcatctcttaaggagagacttggggaagttccaggggaagatgatccaagaactagtcgagatgaccaacttctgggcaaaaaagcccagcattcttcacaaaaggagtccgagcagggtagctaa

SEQ ID NO: 96 - protein, 411 aa, Nicotiana tabacum
MGSSEMDKSSKEAKEAKEPKTPNSQEQASTTTAGSVNPDWSGFQAYSPMPPHGFMASSPQAHPYMWGVQQFMPPYGTPPHPYVAMYPHGGIYAHPSMPPGSYPFSPFAMASPNGVTEAAVSNPGNAEVDGKSSEGKEKLPIKRSKGSLGSLNMITGKNNGPGKTSGASANGVYSKSAESGSEGSSEGSDANSQNVGIESPMNSGGGQDSADTSQNGNAAHGSQNGGTGGAPHSMINQTMAIAPISAAAAGGIPGPTTNLNIGMDYWGAATASSIPAIHGNVPSASVAGGLVAAGSRDSAQSHIWIQDERELKRQRRKQSNRESARRSRLRKQAECDELAQRAEVLREENSSLRAEVSRIRSEYEQLLAQNASLKERLGEVPGEDDPRTSRDDQLLGKKAQHSSQKESEQGS

SEQ ID NO: 97 - DNA, 6604 bp, Nicotiana tabacum
  misc_feature (4125)..(4143): n is a, c, g, or t
attcacttcatacaccttgtcatttcctcctccccttttttctctcctttctctctcaatctcaaatcccaacaactactcactctccttcaattgatcatcatcaaaccccatttcaagaaaatcccaaattttctctctagttatctttacactactcatatatactattgataaatagtccttgttataacctacttacaaacacaagaaacaacaacaagaaaggttgaaaagggagaaagatcatgagttattcgtaatctgtcttatttttctggttactaattctgtatgtgcttatttcttgaaaaaagatggagttattcccagcgcaaccggacttatccctacaaattagccctccaaacaacaaaccctcatcatcatcatcttggaagagaagtacaagtaatagtaccaatgaaaatcaagaaatggatttaggtttttggaaaagagctttggaatcaagaaactcatccaataataataataataataacaattcttcttgttttgagctatctttatcatccaatattaatccaagacctaactctagccaatatttccatcatctccaaaacactaacacaaatatcatccactctttacatcaaaatcaagtactaaaccctataagaggagttccagtttataatcaaaacccttttttcccatatgataatgctaatactacaactacattacctataccatcttctgttagttctttcaattataatcatacaatctcttcatcaaatagccatagccattttcaatcccgtcattatcatcaaaatgggctaattagatcaagatttatgtcaagatttccagctaaaagaagtatgagagctccgagaatgaggtggactagtactcttcatgctcgttttattcatgctgttgagcttttgggtggacatgaaagtaggtttttttctacttagtgttttatttaatctttaattcactattattgagaatggatttagcttatatacacggtgtttgatatggtttgtgtattttaacctgttgtactgagtaatctgttttatttttcaggttacattacttatcccaatttttatggaatgctatataagtgatttgattgtataaattatttttcagattttaatatcggtgtaaaaaagttaaactcaccgaaaaaataatttaacttatatataatagtgcttaaatctttggcgttatctgtttattttaaatattatggtaaattttttatcttattattcagattattgatcccagtctttatggacggttattggtagtgtgtagtagttagattttctgagaaaagctagtattatgagcttaattaactaaatttcatttttgtttttgttttttgggaatgtaggagcaacacccaagtcagttcttgagcttatggacgtgaaagatctcaccttggcacatgttaaatcccatttacaggtaaattcttgtacaaagtcctctcattcattctctctcttcatttgtttttggttaacaagagaatccgtagccgctttccttcggatcgcactgggtaaatcccgctcttgtgctgcagccggcaaattacacaggagagtaaatcgtattaggcaagttccgtgcgatagactcaaattcaagtagatttcgaactttagatcagaactcccgtttgggaagttccctgctcaaccaactcagcgacgcctaagggtctctcttcattttgatgtccaaataatgtgtttttggagttttgacaaaaggcaatgttttcgaatttcaatagtaatgtgtttgagtaaaattatctttttggagtcttaacaaaaggctatggttttctttactactttggacaatagcctacatcatcagaaagatgtttatttccacagacatttcaaattccaatgactctttttaatacattttgtttttagttttttttttctctatcaaaattctcagaacttctttttctacttagtagatctgatggttctgcaatctgcaaccctatttttgcagctttttttcgcctgggagaacgaaccatagactgatgtagtagcagtacgagttctagtaagaaaaagaaaagaaaaaagaagaaaaactcagttcaataaaaggagagatttttggcggggtgtgtgtgtgggcagggggggggagtggatggagaaagtcccatttataatgattcatcaataataacatcagacacatcagtttaaagattatcttaaactgcaaaagtctcagggaagtgagaagagtcattatgccttttttgggggttggggggtgttggggggggggagggaggtgtgcaatcaggattgatatttgacgagttcgacctctaaaatttttaacattgaataattttaattataataattattgtaattttaataaatttttatatctatatatatctatatcatgtcgaaaatatagatatatggtaagattgcgtacgatagactcttgtaatccggtccttctcagaaccccgcgtataatgggagcttagtatatcgggttgtactttatcatgtcgaaaatatatgaatcaataaccaaaaggctacatcagcttgtggaggtgggagcttataagacaaatttagacacattatttttataattgaattatgtacatcggtacagtatgatctttttaggttaaattgatctacaataatataattccacagcataagtcaatttttggtaacgtagaagatctaacaaatacttgttacaataaaatattactacactaataacattataattaaaacaattacactatcaacatcataatatataacttaaatccttatttttactttcactgtagtaatcagcatttaggaccacttataaatgtactattctcctctggatcttttactgaaggaaagatatggctaataataagaaagtacaaacagctatcatcacatagtgaaaattcccttttgttggttttttacaattcccaaaatctcctctatgataagtatatgatttttggcgttactttacaaaataaaagaaaagagtgtttatattttaagattttaacttacataatttacattcgcaatatcattgtactttaacatattatagcaaataatttgagttatatttcatatgttatactaatcccacttatataaattgttacatatagttatttttaaatgatatatgatagtgtaagagttctattttattatcagtacataaaagttaaatactatccgacggtgatggtttatatatttgcagatgtaacggacggtgaagacaactgataaagcagcagcagtagcagcttcttcaggtgcaaaatacagtctaatttgtgtatgactgatatataatttatttcgttgagactggttgttcattatagggtgtttttaagaataatattactataaaacatgagtactagcaagctacgtagcacggactccaaaaaatattgccgcatacgtatcaaattctccaaaaataatacttttttggagaaaccaatacgatccgactatatttttgaaaaatccgagtaacatgagtattgattgttttttaatttcgttatgactaattgttcacaaggtatttttaagaataaattttactataaagtatgagtactagctagcagcgcggatttagagtgttggttacaagttcacgtgaatacgatagttttttcttgattctatatataaattaagatattcactaaatacctacaaattttttattgcgaacctgattattattgtagtattagtttgagattatattgctgtagaaactcatttcatatacttcttaagtaatattttttgtatgtaaagcaaaattgatatgtcgtccttttttttctttacgtttgaacgtttttaggccaatcggaggtgtttgataatggatcatctggggataataattcagaggaattagtgcttggcattcaaaactcaggaaagtctgaattattagttcaacaagataattatcgtggtctttggagtaactcttcaaggtaaacatttctctatgcannnnnnnnnnnnnnnnnnnaacatttctatattcaaacattccttgcttaacttcttcttgttgttgttcttctttccgagccgatggtctattggaaataacctctctaccttcattaggtatgggtaaggtctgcgtacagactaccctccccaaaccccacatgttagaaatatactggtatatatgttgttgttgtttgtatatatactcgtacattcctgattaagacgtagtagttgttatatactcgtggcatttcttttccatttttcttttcgaagtctatttatgcttgaaaccccctagaactaatgagaggatagctttaaaaaagaataacaaatgtgaaatggctagtgaaaattcatatagaccgccctgactaacttaaaagtgaggcttaattgttgttgctgctgttatcgttgtaataacgagagaaaattaagaacaacctacacgtgtccagttaaaacaaaatcacttttacacctccaaaaatctgttggaaccacagagggaaaaaaagatgaattacaaactcctatgttccctttttagatatttctgcaaaaaaaaaaaaaaaagactaaaaatgtgaaaattaaatgcttgtgttcaagttttagaaagattgaaaatttgtagtttgttaacaattattggcctaagaagtgaatttcctatgccaaacatattcaaaagttgtatcagtaacgtaacctggaaaacaaaataaatataacatgttactactacgtatcagataatttgcattggcagtttaacaatctttatatatgctgtgtgtatacaacttaaatctgtagaaaggtaccaaaatgacaaaaatcaacctaaaaagatacgcatatataactttcctatggataatgtgggctcggataaagcatttgaaagaagaccctttactaggaaacttagcgtcaaagctaattctgtatgtaaattattaaaattgtttaattgttttgataaagttgtctccgtataacctatacgtcacggatttgagccatgaaagcaagtactaatgcttgtattagggtaggatgtctacatcacacctctttaggatatgattcttccacggaccttgtgcaaatgcaaaatattttatgtaccgagttatatatatatatatatatatatatatatatatatatttggtgtcaatggcaaaggacaatggccatataggagtagaaatttccttcacctgggtgtagtatttaacttttgttttagccaaaggggaaatcataagaagatgaaaagagtagaaaaagataaaagaagctataaataagagatactaaaagatagcttttctgttttctcagtctcactttttctttcttttgcatgcatggcctccactaattgaaaatattctcttgaaaattggcaatatttgtgttatatagcagggaaagttggcagttgcatggcaaacaaggagattatccaggaaacataccttctctagaggtactgttattattattattattattattattattctagtttgcaaactgtacactgtcaatatatcaaaattaaacttagaaaactttaagttctatgcattgaataatatacaaaaaatatttacacaatcttataaaggtaagtactagtactaaattgtctatgataagcattagtggatgactcggtaaaactagtaattgacttggtatcacatgttaaactaataatgttaaaataatttttacagtttccgtcaatatataaaacttaaattctggaattaatagtcaaaattctttctttccttatttttcttttgatgaacttgttgattttgtggaaaagatcaagcttatcaaactataaatgcatattatgcttctaatgcatggatatataggatataatattcttctaatctgtccaagctagtattggtgaacagagttattagtgaaagttaacagacgtcccataaaataagtcgaggtaggcgcaaactgacccgaacacgctgttatcctaaaaaaatattttaattcttagatagaagtacatacacacatgcagtgtatcagtaagagggaagcaggcttcatcattgttacatatattcctcaaatataaatctgtccttttgattcctttatttacacacacttctcttgtttctacttattattattatacttccttagtactaattcatttttttcttatttgaaaaaaaacaattatacagcagaaagataatattgaagcaaaatgcttaagctatgagggaatatcagcagaagtgagctcatcaactataacagaagcaagtccagagaagcctaatttggagttcactttgggaataaggcctaatatttcatagtactaaaaaagaaagcaaaagtactactcattttgaaatcattatatactttttgattttgactagtgagagtagtaa

SEQ ID NO: 98 - DNA, 705 bp, Nicotiana tabacum
atggagttattcccagcgcaaccggacttatccctacaaattagccctccaaacaacaaaccctcatcatcatcatcttggaagagaagtacaagtaatagtaccaatgaaaatcaagaaatggatttaggtttttggaaaagagctttggaatcaagaaactcatccaataataataataataataacaattcttcttgttttgagctatctttatcatccaatattaatccaagacctaactctagccaatatttccatcatctccaaaacactaacacaaatatcatccactctttacatcaaaatcaagtactaaaccctataagaggagttccagtttataatcaaaacccttttttcccatatgataatgctaatactacaactacattacctataccatcttctgttagttctttcaattataatcatacaatctcttcatcaaatagccatagccattttcaatcccgtcattatcatcaaaatgggctaattagatcaagatttatgtcaagatttccagctaaaagaagtatgagagctccgagaatgaggtggactagtactcttcatgctcgttttattcatgctgttgagcttttgggtggacatgaaagagcaacacccaagtcagttcttgagcttatggacgtgaaagatctcaccttggcacatgttaaatcccatttacagatgtaa

SEQ ID NO: 99 - protein, 234 aa, Nicotiana tabacum
MELFPAQPDLSLQISPPNNKPSSSSSWKRSTSNSTNENQEMDLGFWKRALESRNSSNNNNNNNNSSCFELSLSSNINPRPNSSQYFHHLQNTNTNIIHSLHQNQVLNPIRGVPVYNQNPFFPYDNANTTTTLPIPSSVSSFNYNHTISSSNSHSHFQSRHYHQNGLIRSRFMSRFPAKRSMRAPRMRWTSTLHARFIHAVELLGGHERATPKSVLELMDVKDLTLAHVKSHLQM

SEQ ID NO: 100 - DNA, 1805 bp, Nicotiana tabacum
tatgctatcatgcgcctctctaccactacccattcccccccccccccccctatactccctccccactcctcaacatcaatcatacaacaacctccaccaccacccacctcgccacctcatcatgtttgctatcttgcgcctctttccaacactacccattccccacccaccatcaccaccccatttatatctcaagttcccatctaaatacaataacttaaaaaaacaccactcaatttcctaaaaacaaaaccacacaacaccataatacgatgtcgtctaaccttgatgtcaccgtcgcagaaacatccccgctggcggtggaggaggaaaagcctccagctccggtgaggagatttccaccgccgtgttggacccaagaagaaaccctagccctgatcgacgcctatcgcgagcggtggtacgccctccgccggggctacctccgtacggcagactgggacgcggtggcagccgccgtgaccagccgctgtccagatgcatctccggcgaaaacctccgcccagtgccgccacaaaatggaaaaactccggcaacgttaccgtgctgaaaagcaacgttcccttgcctctccaaccggtaggtttttttcgtcttggttcttttttgataacatggatgctatggaaaatggtactactgttgcatcaatcaaattaaatcagcaaatggccgaaaaacaagtcccatcaattgacccaaatttattgaaattaaagataaatcaaaagaatggtgtgaattttattgaagattggactccaactatcatgttaaatcatggcgttgcgaaaacacccgaaagaaataatttttcttctaagattccaaatgggtattgttttaacaaagaggaaatgccaaatgaggttgagtttggtagtgggtttcgcgtaaaaaatgggatttcaatgaaatcgaagcgatcagtaatgaatagtactagttttgattgtgatgaaggaagtgaatataatgggagtaatgctagtgatggatttcatgtaagaaattttggtgaaaattttggtgtttcgagttcgagaagaaactatggtgggaatgttgaacccaatgttgattctaggtttagtactccaaaattagggaaaaaaggagttggtggtggaggtgggggcggaggggtgaagagggggagagatccgatggaagagatggttttatcgattaggttattgggtgaagggttcatgaaagtggagaagatgaagatggaaatggcgaaggaagtggagcaaatgagaatggagatggagatgaagcggaacgagatgatacttcaatcgcagaagcagattgtggatgcatttgtgaaggttttgaatgaggtaaacaataagaacaagaatgtgaagactgtttcacctgatgaatcatagctctaaggtggagagtttatgtcgatttccattgtttttggagggcattgcaacaacaacaacgatgcctcaatcccaaactagttcgagtacggctcatttccattgttttggatgcattggaacaaaaacgacgacgatgcctcattcccaaactagttcgagtactgttcatttccattgttttggatgcattggaacaaaaacaacaacaacgcctcatcccagactagttggagtcatgttgatttgaagattcttgatttcaaggtctgtgctttaattttgctacctatttatgacttttgtgtgatcatagggaatcatagttttaagtctgtttttgcatttccaggcaatctgtaaaatattgtaatgtgtata

SEQ ID NO: 101 - DNA, 1149 bp, Nicotiana tabacum
atgtcgtctaaccttgatgtcaccgtcgcagaaacatccccgctggcggtggaggaggaaaagcctccagctccggtgaggagatttccaccgccgtgttggacccaagaagaaaccctagccctgatcgacgcctatcgcgagcggtggtacgccctccgccggggctacctccgtacggcagactgggacgcggtggcagccgccgtgaccagccgctgtccagatgcatctccggcgaaaacctccgcccagtgccgccacaaaatggaaaaactccggcaacgttaccgtgctgaaaagcaacgttcccttgcctctccaaccggtaggtttttttcgtcttggttcttttttgataacatggatgctatggaaaatggtactactgttgcatcaatcaaattaaatcagcaaatggccgaaaaacaagtcccatcaattgacccaaatttattgaaattaaagataaatcaaaagaatggtgtgaattttattgaagattggactccaactatcatgttaaatcatggcgttgcgaaaacacccgaaagaaataatttttcttctaagattccaaatgggtattgttttaacaaagaggaaatgccaaatgaggttgagtttggtagtgggtttcgcgtaaaaaatgggatttcaatgaaatcgaagcgatcagtaatgaatagtactagttttgattgtgatgaaggaagtgaatataatgggagtaatgctagtgatggatttcatgtaagaaattttggtgaaaattttggtgtttcgagttcgagaagaaactatggtgggaatgttgaacccaatgttgattctaggtttagtactccaaaattagggaaaaaaggagttggtggtggaggtgggggcggaggggtgaagagggggagagatccgatggaagagatggttttatcgattaggttattgggtgaagggttcatgaaagtggagaagatgaagatggaaatggcgaaggaagtggagcaaatgagaatggagatggagatgaagcggaacgagatgatacttcaatcgcagaagcagattgtggatgcatttgtgaaggttttgaatgaggtaaacaataagaacaagaatgtgaagactgtttcacctgatgaatcatag

SEQ ID NO: 102 - protein, 382 aa, Nicotiana tabacum
MSSNLDVTVAETSPLAVEEEKPPAPVRRFPPPCWTQEETLALIDAYRERWYALRRGYLRTADWDAVAAAVTSRCPDASPAKTSAQCRHKMEKLRQRYRAEKQRSLASPTGRFFSSWFFFDNMDAMENGTTVASIKLNQQMAEKQVPSIDPNLLKLKINQKNGVNFIEDWTPTIMLNHGVAKTPERNNFSSKIPNGYCFNKEEMPNEVEFGSGFRVKNGISMKSKRSVMNSTSFDCDEGSEYNGSNASDGFHVRNFGENFGVSSSRRNYGGNVEPNVDSRFSTPKLGKKGVGGGGGGGGVKRGRDPMEEMVLSIRLLGEGFMKVEKMKMEMAKEVEQMRMEMEMKRNEMILQSQKQIVDAFVKVLNEVNNKNKNVKTVSPDES

SEQ ID NO: 103 - DNA, 6888 bp, Nicotiana tabacum
agcaaagaaagctgaaacatttacttcaaatacaaatttacaaacacaataaagaagtcatatacacaagcaaaacaaaactccaccctttccttttttcaaccatttattagattccttcaatgggtctttcatttgtccattaaattgtacaaattttcagctgattgctcaaaccaaaaaaaaaaaaaaaaaagaaagaaagaaagaagaaaaacccatctcaaatcccttaaaaaagttgttcataattttatttttttgctattttcagtggggttttctgggactttaagatacaaactcttctgtgtagtcttgagttttttttttgggtgtgttttttgcagaaaaatttgttattaaaaggttgaacagaattcaaaaacttataaagattagatttttatactttttccttatcatttcttaagtaaaaaaaaacttttaattattggtgtaaagatttaatctttggatgggaaaggaaggaccttgctatcactgtggtgttacaagtgagtttataattcttcactgtatttttttttcaacttaaattttgttaattttcaagaaaggtggagtcttttttgtttctttgccctatagaattctttaaaaaaaaaatatataaatgggttttttttattgcttaaatagttgttcaattatggaactaaatacccataattttgttgcttcaataatgaacaataaagattgctatgtactgttttgagtttgtgttgtttgtgttttacttaattctatggatttgagtactgtttttttgagttagaatttgtttctggaactgttttttgcttttattttaataccaattgactctcttgtagaatattggtctgttgaaatcctgctaattaagcctctatgagtaaatgggctatgtaaaagttcaatttagttccctttaaatttttcctacagaattggggaatattttgatttgtattgaattcttgattttcccttctaaaaactatgtgatgtgtataatggttccttcatttgcgttgataacaaaatgcgttggctcccaacgtgttggaaatgagtatagggtacttcgtgttaactcttaaaatgcacacagaattagcaaaagattgcgcttttgcagtcttacacacatgtgtatcggatatgtataactagtaaatgtaacataggttccaatgttgaaatgtactttgtaatgtggcattgatatggttccttaaggggtgaaggcagcacgtaaagtgacaatttgatgatgactgatttctaagttcatgatcctgagatttgtaatacgaaggacgtttattccatgaacaaatgttgtttgattgcttagtcatgcttctgttacagttgtgtgttcacataacttgtataatagcacattcttagtcagcgtctcactaagtgaaggcattgagttctattggacgatttctgtatcccctgaaccaagtcacttgattccactcctgcttgagttgatctcgacattgtgacgagttggaacatgttgacaaatatttaggttgcattgttcaaattaggggattgcataagaatcacaccatagaacaaattactccagtagaaaatctttgtacgctacgtttgataacatcttcttggcagtcctcttttgtctttcgctgtatttcttagttttgaactgtaaataatccaacttctctaggaagacgtgttcaattggttacttcttccaatactagtgttacttaaggtcatctgggatattgggatgcttttctttttcttgttattgactcgtgtaacaaattctcgtgcacaaagagtgataaactggttcaagttgtgtaattgccagatttcaagtaggtttactagagatgtttaacaatgtcacattgttcttgggagtataattctttaagcatgtatttttgtaagtccatctagttcaatgatttgaaatagcctctctacccctcggggtaggggtaaggtctgtgtacacactaccctccccagaccccagtagtgggattacacttacattgggtcgttgttgttgttgcatctagtgcaatgatctctgatggaaaattctgtggagctctttgcttttttattcaattccagtcttagctgagttgttgagtggaaggcttcctgttgctcgtcgttgttgctctactgaagaaacaacttcataagaatttttaattatagacatgcaatttgtagtgccttagttacatggtccaattgttgtcgcagtgggaatttgtgtctcgtcctcctttttctctccacacttgggaacttccccatattatgtactttgagtacagtcctaaccatcgaaatcatgttgcaggcactccactttggcgtaatggaccgcctgaaaagccaatactgtgcaacgcatgtggatctcggtggagaacaaaagggactttggcaaactatactcctttgcatgcaagggcagaaccttgtgactttgaggaacaccgagtttcgaggttcaaaaacatgcccatgaagaacaaagaggcaaaggttctgaaacgaaaacaaagtcatgatatggttgaagttggaagtcctcctgattataattttggtttccgaaagtgtttagatgaagatactagcaacaggtcgagttctggttccgttgtctcaaactccgagagctgtgcacaatttggtagtgctgaagcaagtgatttgacgggtaacctaaatatttctttgttgatgcctactgtttatgttctacctttttattagttatatcaatatattgttctcagaattatttcactttctctagtatatactccctgcgtttcaaaatgaatgaacctatttgactgggcgcagagtttaagaaagaatcgaagtcttttggaacttgtggtctaaaacaatctatagttatttgtgtggctataaatcatctcattaagggtaaaatgcaagtttagagttacattgattccaaatttagaaagaggactttctttttgaaacggactaaaaaggaaataggttgattctttttgaaatgcagggagaatattttttggataataactgcaccttctctagaattatggctgcattttcttctaaaactgaaaattttgggaccaaatctcgaacttggtctcttctttcaatcaaacttaaagtgtagttgtttgttcttagcattttcttgtgttttatgtttatgtttctgttttgaagtttttgtgcgtgaaatatttaccccttgattttggttttcaggcccggcgcaatccaatatatgggatacaacggtgccgtcaaagaagagaacctgtttcaatcggccaaagccatcttcagtcgagaagctcaccaaagacctatataccatcttacatgaacaacagcaaagttcatgcttctctgcatcctctgaagatgatttgcttttcgagagtgaaaagccgatggtttcggttgagataggacatgggagtatgctaattcggcatcctagttcgataggtagagaagaagaatcagaagccagctctctttctgttgacaacaagcaccgttctgtcaatgaggcttattcacgattgactacccgacctgtaaatattattaagggtgtcaattcacctaatatgggtgccgacagaaccaagaaacctattggtcaggctgtggaacaagaccagattaaaaggtgcactctccattagtcttgatagcatgtaaaattgcatcgagaaactaaattttgtctgcatgttggtcagatggaatataaggtgttaaatgcattatatctgctaaagttggatgtcatgtcgctacacaggtagtatcatccagggcagaggtagaagcctgtacatgggttcggcggaacccagtagcttttgctcaaatagtgtatttgtgttaagaaattcattaaatttgtacacatattgaacttagaaccctgttgttagtcgtcgtacttagatccaaaacccataaagttgaaatcctggctccgcctttggtatcacctacgggtctggaacatacattattttggtcaccacatcttctaaacaacacaagtccacatttttccgttgaattgttaggtaaacttgttgcagcgtcattctagttccatcattctatgagcatttgaagcctttctctttgtttttggtgtatgcttaccatctttctgatatattttctaaattgcagaaacaaagagaaacttgaaacactacagattcttggacatcataattcaccccttcgctatatagaactgaaggtctgtcactctctcttgtattttgtataaagtaattttgctttctttcacttaatactaccataggatgtcctaacaacgccaacttgtctgtgctgctggtttattgttgttgtttgtagtcttaaaatgatcttcctcttttgattatcattagtaacttttgacttgcgtggattgtctttctctttaacagtaaatgtctttaaccattttcaaagtcaattttcactaggttgttcagtgtgaaatgttactggaaccgatcagaaattgataagattatgtgatacttggtgcaggatgtacttaattatgaagaattcatgaggcatttatcaagtgatgaacaacaacagctactaaagtacttaccgcctgttgattcttttgcgcctccagataggtttgcacgtcttctctatatttcactttctggtcatgttttggcttatattgaacttgaacaacaaattattttcctgttcttttctctatctgcagtcttagaagcatgttcgagagctctcaatttgaggaaaacgtctcttccttccagaaacttcttgcagaaggtgttttcgataactcattgccaggagtaaaattagaagattgtagaacattgaagaggtttatattatgctatttatcaaagtcaaagtgggtggaacaatataatctactcaaggtttggttactaaccatttgttgcatatatactgaacatgtaatccaccatctactatgttattatatctgctaaatgtaatgcaatttattgaagctaattttgtttcttcggtaggacacaaaatgtaagaatagtagcagcggttctgaagttgcaggagagcaaagtgttgtcggcacatgtcattcagtgaatgcgaagagaccacgggaggggccacatctaaagtattcgggtcggtagtgttcctctttcactcttccctttatgacatttgacatttcctcagtcatagacttgttttgacgggagataagtatttacctgaggattgttgttcaaatttgcatagtaaagaaagcacatgttagataaggacttgcacatgagtttgagcattcattactgagttctctacgttgttatgtcgtataaccggtaatatttagaaaatgttcccgacaatgctatgggttatttcttcacacatgagaaaccacatagtgtgccttattaccattgggagtaaatacatttgttgaaaacgagaggttggaaataaaggttggtaaaaagagaagtttacctatatatctctgtcttctattattccctctgttttaatttatgtgtcttactttcctttttagtctctttaaaaaagactgccactttctatttttagtaactctttaactctgccaatccacatggcatgtttcaggccacaagattcaaggatattttggtacattacacatctttaatttaagaccacaagattcataagttttccttacttttcttaaactctgtgtccggtcaaactaagacacataaaataaaacgaagggagtatttctttttagccctctctaccagcaaatattcctttagtagtatatgcgaaaatcatgattggtttgactaggtaagcatcacaactttattttactctagttacttaataaataggtaagcatcacaacttgttcaatagggagattgatatcctttaacctttgactacattaaatacgtcaattctacgaagcttttatctctatctagtatcttctccatagaactttctcaagttaaactattgttcaaattcatgtgggaatgtacaagaatttcctcccccctttgctccatttccatgtgcagtgtgttgtcgattacatatttgactaattccaacaaatttaaatatttacgagctatttcgcttcaggtgcaaagacaacaatgaagagccccaagagtgcggtgatgaaaagcatctatgagcagaaggaactattagacaatgatggttcttactccagcccaaaaagctcgttcgccttgccttctgagactagttccctcgtactggattctttccgttctgcaaacgaaaattctgatcaggacttgctgctgaatgtgccatccaacagctacttccctcaagcagaactactcttaccaacatcaagttttactcctcaagcgagtgctagtagtagctcaatgtatccttcacatctcgtccgtccctagccatattatcacactttgcttgctttctttatatctcaaagctagttaagccaaacaatatgatagtgttgcatatcccatgcaaacttatatatggaatttgccaaaggggctcggatggttaccttttcgcggttgacctattttgaaaccaaattttggatttagcaaatggatatgattgtttttcccttttgtataggttgataaaacaatgtaaaatatagctgaaaatgcagaagtggtaatgaatggctagaaatattgtatgcagtgaaatttttggcttaattttgaacac

SEQ ID NO: 104 - DNA, 1635 bp, Nicotiana tabacum
atgggaaaggaaggaccttgctatcactgtggtgttacaagcactccactttggcgtaatggaccgcctgaaaagccaatactgtgcaacgcatgtggatctcggtggagaacaaaagggactttggcaaactatactcctttgcatgcaagggcagaaccttgtgactttgaggaacaccgagtttcgaggttcaaaaacatgcccatgaagaacaaagaggcaaaggttctgaaacgaaaacaaagtcatgatatggttgaagttggaagtcctcctgattataattttggtttccgaaagtgtttagatgaagatactagcaacaggtcgagttctggttccgttgtctcaaactccgagagctgtgcacaatttggtagtgctgaagcaagtgatttgacgggcccggcgcaatccaatatatgggatacaacggtgccgtcaaagaagagaacctgtttcaatcggccaaagccatcttcagtcgagaagctcaccaaagacctatataccatcttacatgaacaacagcaaagttcatgcttctctgcatcctctgaagatgatttgcttttcgagagtgaaaagccgatggtttcggttgagataggacatgggagtatgctaattcggcatcctagttcgataggtagagaagaagaatcagaagccagctctctttctgttgacaacaagcaccgttctgtcaatgaggcttattcacgattgactacccgacctgtaaatattattaagggtgtcaattcacctaatatgggtgccgacagaaccaagaaacctattggtcaggctgtggaacaagaccagattaaaagaaacaaagagaaacttgaaacactacagattcttggacatcataattcaccccttcgctatatagaactgaaggatgtacttaattatgaagaattcatgaggcatttatcaagtgatgaacaacaacagctactaaagtacttaccgcctgttgattcttttgcgcctccagatagtcttagaagcatgttcgagagctctcaatttgaggaaaacgtctcttccttccagaaacttcttgcagaaggtgttttcgataactcattgccaggagtaaaattagaagattgtagaacattgaagaggtttatattatgctatttatcaaagtcaaagtgggtggaacaatataatctactcaaggacacaaaatgtaagaatagtagcagcggttctgaagttgcaggagagcaaagtgttgtcggcacatgtcattcagtgaatgcgaagagaccacgggaggggccacatctaaagtattcgggtgcaaagacaacaatgaagagccccaagagtgcggtgatgaaaagcatctatgagcagaaggaactattagacaatgatggttcttactccagcccaaaaagctcgttcgccttgccttctgagactagttccctcgtactggattctttccgttctgcaaacgaaaattctgatcaggacttgctgctgaatgtgccatccaacagctacttccctcaagcagaactactcttaccaacatcaagttttactcctcaagcgagtgctagtagtagctcaatgtatccttcacatctcgtccgtccctag

SEQ ID NO: 105 - protein, 544 aa, Nicotiana tabacum
MGKEGPCYHCGVTSTPLWRNGPPEKPILCNACGSRWRTKGTLANYTPLHARAEPCDFEEHRVSRFKNMPMKNKEAKVLKRKQSHDMVEVGSPPDYNFGFRKCLDEDTSNRSSSGSVVSNSESCAQFGSAEASDLTGPAQSNIWDTTVPSKKRTCFNRPKPSSVEKLTKDLYTILHEQQQSSCFSASSEDDLLFESEKPMVSVEIGHGSMLIRHPSSIGREEESEASSLSVDNKHRSVNEAYSRLTTRPVNIIKGVNSPNMGADRTKKPIGQAVEQDQIKRNKEKLETLQILGHHNSPLRYIELKDVLNYEEFMRHLSSDEQQQLLKYLPPVDSFAPPDSLRSMFESSQFEENVSSFQKLLAEGVFDNSLPGVKLEDCRTLKRFILCYLSKSKWVEQYNLLKDTKCKNSSSGSEVAGEQSVVGTCHSVNAKRPREGPHLKYSGAKTTMKSPKSAVMKSIYEQKELLDNDGSYSSPKSSFALPSETSSLVLDSFRSANENSDQDLLLNVPSNSYFPQAELLLPTSSFTPQASASSSSMYPSHLVRP

SEQ ID NO: 106 - DNA, 3087 bp, Nicotiana tabacum
gtttcttcccaatttacctatatataatggtacatactcaactagtgtactattacacttaagtttcttaaaagatggcaacttgcaatggaaatggagctgcaaaattttcctccaaattgcaagttgaagcaatccaaactgtgataccaatgaagataaccgatccacggttatcgaggcgaatctcggtatctgagaaattttgctcgggtgatttgcaaaggcgatttcacatggtgttgtactataataaggcatcagagacggattcaggatggatagttgcgggttggtttaaagagtcattaggaatggcaatagttgaaagtccattatttggtggaagattaaggaaattagaggataataatgatttggaattggtttcaaatgattctggtgttagattggttgaggctaatgttgaaataaatatggctgattttattgatctcaaaaataaggaaaatatagaaactgagtttgttttctgggaagatattcatgaaacaagtcctcaattttctccccttttctatgtccaggtaagttcaattctatacttagcatagcgattagattcttgtcaattttattttgtttataactatggtgttcgggtcaacttacgtgcacctgaactaattttacggtgtacatgctagtttgctaccttctaccaacacaaatgtcgtataattctatctattaaggctttgaacatctgaaaagaaatcacctagtgtttcacaagtctatgtctatggctgtcaaatttggcccaagcctagttgacccgcccaatctacccaaagttgggttggttattgacccgcctatttattgaacttagtttatcttgacccaacccatctcaggttgatttttagaccaaattaatccatgagtaactttgctcaaaatatcataaaaataactttggttttgtttgatatgttatacacaattattacaaaagaaaaaaaagtcttataattatacaattcatatgaaaacaacatatattaattaaagcttgacaaatgttgggctggttgggctatgacccaaattttagtccatcttgacccaactcatcttagcccaagcaacttttgggcgagtcattgacccgcctatttattaactcaacatgttttgactcgtccaaaatcggcctaacctgacacccctatctatgtcaatttacatggacaatataaagaatttttggcactatcaaaataatttaacctgttgtagtaagtaatatacctcatttttccgttgctaatttcactttttatggataatttcctgtagttactttgtagagaacctaatattataaaaattcttttacactacctatatattttaatctattgcaccgggtaatctatcttatattttatcttcataaaccgattttttatgaaaaaaattacctttaattatctttgcaacgatatgatgcttgttctatttgctacttatttagtaattttattgacaatatgcatggtctgagccaaaattattgattctgatggttcaaaacctataactttgtacactacactcatctctaactcttcccgcaataatagtgtcgcaccaaattattaagggcccgtttggctataaatattttttcacttttttttctgaaactttttcacattttttcggtatccgcatttggccatgaaaatttaaatttcacttgaaattgactttcagaattttatgaaattttaaaaaactccaaaaaagctatttttcaaaattcacttcaaatgactcacaaaaattcaaaaacagctctgaattgtattcatgtccaaacacaactttaatttccaaataccattatcacttattttttattttttcccgaaatttcactattcttatgtccaagctattttaacctttgaaataattatttttcaggtgacaaatttcaagtgtggaggatactcaattgggataagttgcagcctttttctagcagatccatttgtcatgacaaatttcttgaaaaattggtccaaaattcacaacaaattaatctcacaaattgatgcaccaaaaattccagcattttacactccaaatttaagaaaagttggctttttacctactatatctactagcttaaccacaagaaatcaaaccacccaaactcaaattttcaaaattcccaaaacccccttgaatttaaacaataatttcctcaagaattatgcagcaaaatgtattggagaaatagaagaaaaaattggtaaaaaattgtcttcaaaattcactttgtttgtgaaagagagtactaattctgagaatgtaattaaggtggaaacttgtaataaagaggagataattaaggaggaatgtggattactatctaaaaatggtggattaatttcaataagttgggatgatttgggaggtgataaagtgagttttaatgaaggaaataaggctgttaatatgtcatgttggattattaatgcagaaaatcaagatcttgtgatgattactccatctcttgatgaagatagctctcaactaaacattataattaccgttactaattagatttttatagtcgattccaatttgtttgggactgaagcgttattgtcgctgcgaatcaaattcttgagaaagcttgaaaaagatgtacttattttccccaccctaacccccaccaagaaaaaagaaaaaaaaagagaaatatttttttgtggctcttattattttgggtttttgggggacattagttttctttttagtagttgttttaagtaaattggttgtactatgttatttatcaaatattttgttatattctacgagatcaatacttccttttgaatgtttttggaagtccaagcttttatgtatctcaagaagattatagctgtcaagaccactagataaaatgtttcatataacattaacactactcaagttcacaactttgcaaagagtttaatatttgtgcacgaactatgtaatttttttgtactatcaggttaagatgaataaatgacttatacaagatatccatatctaaat

SEQ ID NO: 107 - DNA, 1119 bp, Nicotiana tabacum
atggcaacttgcaatggaaatggagctgcaaaattttcctccaaattgcaagttgaagcaatccaaactgtgataccaatgaagataaccgatccacggttatcgaggcgaatctcggtatctgagaaattttgctcgggtgatttgcaaaggcgatttcacatggtgttgtactataataaggcatcagagacggattcaggatggatagttgcgggttggtttaaagagtcattaggaatggcaatagttgaaagtccattatttggtggaagattaaggaaattagaggataataatgatttggaattggtttcaaatgattctggtgttagattggttgaggctaatgttgaaataaatatggctgattttattgatctcaaaaataaggaaaatatagaaactgagtttgttttctgggaagatattcatgaaacaagtcctcaattttctccccttttctatgtccaggtgacaaatttcaagtgtggaggatactcaattgggataagttgcagcctttttctagcagatccatttgtcatgacaaatttcttgaaaaattggtccaaaattcacaacaaattaatctcacaaattgatgcaccaaaaattccagcattttacactccaaatttaagaaaagttggctttttacctactatatctactagcttaaccacaagaaatcaaaccacccaaactcaaattttcaaaattcccaaaacccccttgaatttaaacaataatttcctcaagaattatgcagcaaaatgtattggagaaatagaagaaaaaattggtaaaaaattgtcttcaaaattcactttgtttgtgaaagagagtactaattctgagaatgtaattaaggtggaaacttgtaataaagaggagataattaaggaggaatgtggattactatctaaaaatggtggattaatttcaataagttgggatgatttgggaggtgataaagtgagttttaatgaaggaaataaggctgttaatatgtcatgttggattattaatgcagaaaatcaagatcttgtgatgattactccatctcttgatgaagatagctctcaactaaacattataattaccgttactaattag

SEQ ID NO: 108 - protein, 372 aa, Nicotiana tabacum
MATCNGNGAAKFSSKLQVEAIQTVIPMKITDPRLSRRISVSEKFCSGDLQRRFHMVLYYNKASETDSGWIVAGWFKESLGMAIVESPLFGGRLRKLEDNNDLELVSNDSGVRLVEANVEINMADFIDLKNKENIETEFVFWEDIHETSPQFSPLFYVQVTNFKCGGYSIGISCSLFLADPFVMTNFLKNWSKIHNKLISQIDAPKIPAFYTPNLRKVGFLPTISTSLTTRNQTTQTQIFKIPKTPLNLNNNFLKNYAAKCIGEIEEKIGKKLSSKFTLFVKESTNSENVIKVETCNKEEIIKEECGLLSKNGGLISISWDDLGGDKVSFNEGNKAVNMSCWIINAENQDLVMITPSLDEDSSQLNIIITVTN

SEQ ID NO: 109 - DNA, 6781 bp, Nicotiana tabacum
tttcaacactgaaccttccacacacacagacacacactcactagggttttaaaccacttcactcccctcaattatcagccgctttgacacaattttgtttctctcaaattcctcttctctattgccgctttcatattataccaagcaattcatccaaatggattttaatcactaagtttttttttttgatatcttaaaatattgtcctctttgaatttttcatatatctgtttgtactcaaaaaataaatggctacactaaatccatttgacctattggatgatgatgctgaggatccaagtttggatgagttgaaactggctcaagctcaggcttcagctgttggttctgtacctaagaaaacgggcccagttcaggcccaagctcagcccgctaagcctgctgctaagttgccttccaaaccagttccaccttctcaggctggtaaatatgcatttttaatcattttaaacatattcttttgttttaggttaatgtatatttgttcatacttttttgtattttttgggtttatattttgtctgaaactggcctatgaagctgaacgagtttagattcatgtagctgatttagtttggattgagtagtgcagcttgtttggatggttgttatatattggttcttaacgtattgtattgtatattgtttcttaatgtattgtattgttttaatgaatacaatgtttggatatattgtattattttctgtcatttcataatgtcacaacaataatttaaagaataagtgcacaatattacaatgaaaaagtagcctatgaattagagaaattattaaaaaggcagggcaaagagtataatagaattatagtaacggcaagatgagaaaataaataaggtaatgacgtgatcacactaaattggtcattacataaaatgggttttttccgttgttacgtaacaacggatttaataatatgatacaatcaaaacaaacattgtatttaccgtaacaatacgatacaatataatacctaacaaccatccagacatggtggtagtagttcttattattgtagtagtaatagtagtgaatgaatatggcttttataacaagttatgctgtaagttatatgtacattaacaatgtaatgaaattcttatgttatcacggaaatttcagtaggtataactggttagttatttggatttattgtaggctattaatcaatgcttattagatgagtttgagttctataaattgagatgtttttttaaacaatcaggttgtctattatgtaattacaatgaattcatttacaagcattaattgttaatatagcaaaaatgataactagcctactatcacagcttcacagtatttaccatgccagtgtatattgcttaaatccttattaaatatagttacctgcaattacctagacatgatgtaaaaattcattacaccgttggtgtacataacttaaattcattggatattatataaacgttggtggggaaaaagataaagtgtgaggaatattgaggttgttgccttaaatgtcagtgaactcgactaaggcttttgagttttcaacaacttagttgtttttaagagaatacttgctatttgcagggttatgcttgtttttagtcttctctttcgttgtctattgtgtagctgcttgaagtatatattgtggaaatgttgtttttcctattcccaatgtgacactgttatgtcatagtatgggcttgtgttaatcttacatgcttaaacttttaggtgatacaaatgaatcaataattatgtctcggtccgtaattagttggatctgaaacaatcaacactttttagccataaaaaatacgtggaactagtggtggttttctcaatgcttatgcaattattttctgtctgctttttagtaagtatgatagcttgctagtggatgggaagagaatgtcctctgtgattggcagattaaagtagggttattatatggaaatttgattagcaggaacttagttgcaagtggtagataaatctttagagaacgcgtcattcttgtgtcccttgactgtgtgtctcacaatagcgtgaggcgatgcgatgcgagcagcctgcgctattttggttgcgttgcgattgtaaaaggcgagcgcctctgcctgtgtagcgagaggcggcgtcgctataaaacattagggcttgggtttttcacttcttctccttcagcgctcttttctcagcaacagaaaaattagggcttgggattcatcttcagccatcagtgacagtaacctaggtatgtttctttcttttcttttcttcttcttctcctttcttcttcttcttcttcttcttcttcttcttcttcttcttcttcttcttcttcttctatttcagcgacagtaatcattgctgtcttctttttttttcttcgacagtttgacttcaaccattgtcttcttcttttttcttttttcttcttcttgtcttttattttttgtgctctgttttttgaccagcagagcagaggctctttctttctttcttcccttcctctttcttcttctcttattttttttggctctgtttggagcaagcagcagaggcagaagagtgtctttttaggctctgtttttttttgaattgatatatttattaatatattattgttattgagtttttagtgttatatatatatatatatatatatatgtctttgtataaattgtcgcttcgcatcaaaaaggcgagcgcttcgctacgcgcctctcgcctcagtgaagcgggcccttgtcgctatttgtcgccgcacgctatccaaaacactggtgtctcatatctggttttgatgttctggtgttcgttactgaccacatctctataacagacaagtaaacgcttttgaatttgctactgttgtgttttccttcattccagctcgctattcaccttttgtcaattaacttctagctcgcagtactcagttactcaattgcttatttgtgtaacaatttctgagcagtgagggatgcaaggagtgacagccagcgtggaggaggacgtgggggtccacgtgggggaggccgtggacgtgcgcctgggcgtggacgtgggtttaaccaagaatctgctgatgatgagaatgcttttggcagtaacaatggattctctgggcggtacagagttcaagaagatggagagtcaggaaagctctctgaaaggagaggtggatatggcggacctcgtggggggttccgtggaggtcgtcgtggtggtttcagtaatggagatgctgcagaaggagaaggggaacgcccacggagagtgtttgatcgacgaagtggaactggccgtgggtaagtgattctgctgtacttcaatcccattcgtctgtgttgttcaatcgctcgaaatcgtggttattgtggttgtcattgtttcttgggcatatgatgtgtatctttattgacatgtcctattgtataggaatgagtatattaaacgggagggttctggtcgtgggaattggggaactcctgcagatgatattgcacagtgagcgctgttatctcaattttctgtttccttcttccacttgcctttacgtattagttttttcataatagttgaatgttggtttttatccaaatttagagagactgaagtgcctgttaatgatggtgagaagattgtcgaggctgagaaagaagctggacaggaagatgctgaagacaccaataaggattctactgctgctgagccagaagagaaggaacctgaggagaaggttactgtcattttctgttaaaagccatttttttgttttgcttgtttacatgctctaattcttctcttgcaaattaatatctgtctcacttcactattatccttttgggtggttgttttggtggatataggagacataaatttcaatattgaatttctggaatgtctcattgtcaattttaatcagtttggataatgaatattagtccagttgcacatctagttttcaatacactaatgccatctaaccttttcgaaaccagtaatttggtttatttattgttgataagattcttcaatattatccaagtattttctaagatagcatcatttccttccaatagactagggaaataacggccacatgtgctcgtattaacatgtaagattaagttgaaacggccatcctattaaagatttatacttgtagtttgcgttgtgcattgaagggtaatagtatgaatttggaaatggtcatcgtattcttacgaatgattcttgacatcagtaggaggatgtcttgctacaattattccctccctctgccaacttctgaaaagggcctaaggttcagtgcagacacgcttcaccgctattccctttgggaacatcatttatattcgttggctttagtccctcgttcttggctaaaatttaataaccacttggtgctccagttgatttttcctaatttactaattgtttcttttaaaaaatggaatcatactgttatcaatgttacctgcagcagatgtttctgtgaagtagatatgaacttggactattgttttctgatagactaggtacttcttaaccttgatttgtatatgttggattaatttttttgtagctatttatttacactgttgtagctacttttatttgcatagattccagtagtttttattcatatgtatctattatcattatccggaactaatatcattcatatctgtttgtgttggtaggagatgacccttgaggagtatgagaagcttatggaagagaagaggaaggcgttgctggctctaaagcctgaggaaagaaaggttaatttggacaaagaacttgaaaccatgcaacttctctcaaacaagaaaaatgatgatgaaatcttcattaaattggtgagttgtttggtgctatcctcctatttatagttgcttaattgtagtattaagaactaattgtcgtattaagaacttgattgtgttatatgctagcttattcatcatacgtgaattttttgtctgggcagggttctgagaaagaaaagagaaaagaggcagtggaaaaagccagaaaggtactttagtttctctctttaagtggctaaatttgtatcatagcaactggagacatgattttttatgcatctctttgttgggaaagcgttctatttcataaacccattgtttaaatccctcaaagttgatattcaaagaaaggccacttttcttttggataactttgtttgtcactgtttgaagcacgtttttctgaagtgttagcttttaataacactgcataaacctactagtatatgtgtcttgtcattttatttgtcaaaagttatgtacctaatgggctcttcgcgtacggaagagcaattcatcctacctctttgctacccctcccaatagagaaaatatgtgttattttgaacttcaagaatcacggaaaaaatttcagttatactttttaagactgaaagctgtctatgccatgtggctgtttagttttatatcagcttccaacatgatgaaagttgttcccaacgcatggaggtttgactcatacattgagtactcgcttcaacagcctcttcccttggttcctagtggggcaagagcaggatgcggaagtgatatgatgtatacagttgtacaggtgtcagtattaaagtttgtctggtttcacctcagtatcattttattttgaaatcatttcatactttctctttaacaagaagagcttgaaagtctacacttcagaagtacccctgcaagtataatattttaaagacaatgtattgatccgcatttccagaccccacttagtgggactttactgggtcgttgttgttgttgttgtattgatctgcaaattgtcgaattcaatagatttaattattgcttcgactgtgaggcttgatacgtgaggcttgatacatctgattttgtgcagaccaaaagcataaacgagtttctgaagccagcagatggagaaagtagttattatcgccgtggtggtcgtggcaggggacagggccgtgggagaggtggttttggtggtggtgttggtggaaacaaaaacttttcagccccatctattgaagatgttggccagttcccgtccttggttgccaaatgagggagcaactctggcatggattaggtaaaagggagctactcttgccatctgagctgtctttcttttctccatatttatgatatttgggctttttgatgatagctgaatatttcctggaaccttgttcttttagtctgtaaatttagatattttctggggatggtttctttttgttgacttttgacatgcatgaaaacccttctcttcatatataggtggtaggatctaattttatgttttttgtttacttgtcgaatcagtttttacgtgcaaaatggataatgattcatacagtttatcctagctaatttgatattgagatgcttgtgacagttgatttcttatctaggttgcacttctagtggttgttttgataaaatttggaaggtctaataccctaaacatgtttgctactgtgtagggcaaaattcgatcagcctgaaagttgacagaggccaagtttctgcgtctataacgacatttttgattattgtatgaacatggagcaaatgagaatgttacaaaaatggttcatgcagaagactttaattatgtttctggtagttgtaatgttgtgtttcttttgttttagtagtgataaagagatttctagcaagagcttaattcatga

SEQ ID NO: 110 - DNA, 1125 bp, Nicotiana tabacum
atggctacactaaatccatttgacctattggatgatgatgctgaggatccaagtttggatgagttgaaactggctcaagctcaggcttcagctgttggttctgtacctaagaaaacgggcccagttcaggcccaagctcagcccgctaagcctgctgctaagttgccttccaaaccagttccaccttctcaggctgtgagggatgcaaggagtgacagccagcgtggaggaggacgtgggggtccacgtgggggaggccgtggacgtgcgcctgggcgtggacgtgggtttaaccaagaatctgctgatgatgagaatgcttttggcagtaacaatggattctctgggcggtacagagttcaagaagatggagagtcaggaaagctctctgaaaggagaggtggatatggcggacctcgtggggggttccgtggaggtcgtcgtggtggtttcagtaatggagatgctgcagaaggagaaggggaacgcccacggagagtgtttgatcgacgaagtggaactggccgtgggaatgagtatattaaacgggagggttctggtcgtgggaattggggaactcctgcagatgatattgcacaagagactgaagtgcctgttaatgatggtgagaagattgtcgaggctgagaaagaagctggacaggaagatgctgaagacaccaataaggattctactgctgctgagccagaagagaaggaacctgaggagaaggagatgacccttgaggagtatgagaagcttatggaagagaagaggaaggcgttgctggctctaaagcctgaggaaagaaaggttaatttggacaaagaacttgaaaccatgcaacttctctcaaacaagaaaaatgatgatgaaatcttcattaaattgggttctgagaaagaaaagagaaaagaggcagtggaaaaagccagaaagaccaaaagcataaacgagtttctgaagccagcagatggagaaagtagttattatcgccgtggtggtcgtggcaggggacagggccgtgggagaggtggttttggtggtggtgttggtggaaacaaaaacttttcagccccatctattgaagatgttggccagttcccgtccttggttgccaaatga

SEQ ID NO: 111 - protein, 374 aa, Nicotiana tabacum
MATLNPFDLLDDDAEDPSLDELKLAQAQASAVGSVPKKTGPVQAQAQPAKPAAKLPSKPVPPSQAVRDARSDSQRGGGRGGPRGGGRGRAPGRGRGFNQESADDENAFGSNNGFSGRYRVQEDGESGKLSERRGGYGGPRGGFRGGRRGGFSNGDAAEGEGERPRRVFDRRSGTGRGNEYIKREGSGRGNWGTPADDIAQETEVPVNDGEKIVEAEKEAGQEDAEDTNKDSTAAEPEEKEPEEKEMTLEEYEKLMEEKRKALLALKPEERKVNLDKELETMQLLSNKKNDDEIFIKLGSEKEKRKEAVEKARKTKSINEFLKPADGESSYYRRGGRGRGQGRGRGGFGGGVGGNKNFSAPSIEDVGQFPSLVAK

SEQ ID NO: 112 - DNA, 4688 bp, Nicotiana tabacum
aattcaaccggatgcttactctgtgggaacaaagtggttccaccaccaactccgccgaattcagcaaactctggtcgacgacgaaactagttgagccgcagtccgccgatttaagctccggtaaaaaagtcagcaccagtgacatggtggaagaaacttgtgggagcggttaaggcttactgggtgtctgcaaaactgatgaagaagggtaaaaagttgtgtcaatttcagttttggatttgaaaaatgcttcttaccatgtcaccgaagcttgaacggaatcgaaaaagtccttcggcaccgacacttcgatgttgcaccaatgaaattattctggtttataattaggcaaatgggtattctttttcaggtgattttttttatactttttcgaagtttctgagaaatttaaaaaaatgatagaagatggaatgctagatatttctcttttctgattttgttataaattacagtctacattgtagtacaccaagtgaaagtaaatgttgaagttaagaattatagcaatttttttattttttttgtaaacacgagaccaaatttgtggttcttgggtgaccatctgatgcatttgttagttgcacagaaatgagtaaagtgactcaggtttgggaactagaagtctagaatctcatggagggtatttttttttttttaatgatcacgtgagttatacgtgggatcagatgttagggttaacaattattttcgaaaatctattagttttagggttgaagaccaaaaatgtccattttttctaaatagtaaggactatacctgttaaggggtatatatgaaggaccaagataaaccaaccccaatacattaaggactattttgatcattttctagaaaaatattgtcttttggaccaaaaattgagtcaaggagagaaggaaccctcagtcaaaatattgtcttttggaccaataattgatttttccttgtatcctttatgttcttgttctcgaatttctgctagtttagtctcacgaattggtcgatggaaataatttttaatgttgtagctggttttgttgttgaggtggggaagaaggtgtgtaaatgcatctatcctaagattgaaaataccgtccgtttcacatcaaatgttgaaagtgtaacagaggaaatggagaatttaagaaagtttagagatgatatcaaagggaaggtggaaggagctgagggagaaggctataaaccaaaaccagaggttctccagtgggtcgaagatgttcaaaagctggagactgactgggaatctatgaaagaagacattgcagcggctaagatggttgcatataaatgttgtccaaattgcagtcttcgctcggaagtctccactcaagcacgaatcatgcgagatcaactttgcgaccttaaaaaaatgggagaaaattttggatccagtttggtggttgaaaattaccaggtgaaaaaagtggagtacatcccaggaccatcaatagaaggccagtcagcagcaacaagaaatctcaacaaaatcctacaactcttagaagatgataaggtaaattgattgttgaacttaaaccattccaagactagtaatcttaaattgtttaggattggtagttgctaatttacaacaacaacaacaacaacaacaacaacaacaacaacaaatccattgtgattccaccagtgaggtctaggggagggtaaatatacggagggggaccttacccctaccttcaagagagattgttttcggacgaccctcgggaaaaataaaagaagggcagcagcaagcacaccctggttttctgaaatatccacaaccctcctcaacctcaactccaccaccctctcccaaacttttatagtgtggcttaatagcttgatgcctcggtagttgttgcaactttgaatagcacccttgaaaaaatccaactcccgagatcatagctctcgcctcatagaagaaatactatgaagaacttaagcatctgggtatgaaaaaatttaggtcaatccaattttgattaatctctaatggctaagcaagtgtcaggatgctatattttttgttatgtttctatgtgttcttctttttcctttgcatccacacccaaactataatggtagtgcttgaatcctttcaggtatgcatcattggtgtatggggaatgggaggagtcggtaaaacgactttggtgaagaatctgaacaatgagctcctaaagactgctacgtcaagctctaatctgtcttttagtgttgtggtatgggttacagtgcccaaaccgccaacagacataagaaaggttcaagcacaaattgccaacagattaaacctaaaggtagacagtgaggaaagcgtagaacgcattgccagcagaattcatcagaggctcaaggaagaaaagagtttccttcttatactcgatgatgtttggcaagctataaatttggatcatgtaggtgtgccccaacctgaagatcccgcaagaagcaaggtaattttaacttctcgttttgttgatgtttgtaggcaaatgaaaacagacaccgaaatgaaggtgttgacatttgatgaagatgaatcttggcaaatgtttgtcaaaaatgcgggagatattgccaatctggagcatattcaaccagttgcaaaggaaattgcaaaggagtgcgatggattacctttagcaatcactgtcatcggagcatctatgagagggaagaagagggtcgagctttggaaagatgctttggaatcacttagaatgtgtgaacctcacaacacaaatgtaaaagataatgtttacaaggtcattaagtggagttttgattctttagaatctcaggatattgaattatcctcagagcaaagaagcaaacatgtgaacaaaaggggaggtgacattcaaagttgtttcttgtattgctccttatatccagtggctatttcaccagatgatgtcatagattgttggtgggcggaggggttccttggagaacgtaacacatatgaagaagcctacaacaggggaattacaatgattgagattctaaaagatgcctgcttactagaagcccatgagtgggattctgtaaagatgcatgacgtggttcgcgatgttgctatatggatagataattccctgggggataagcacaattctcttattcaagctggacttgggttgtctgagatatcacatattaaaatgtcagcttctgtcaagagaatgtcttttgtaagcaacaaaattgaacgtttacctgattccttcatggagtgcccagagacaacaactttacttttgcaagacaattgttgtcttgtggaaattcccgatacgttctttttggcatttccagccctaagagttttgaatctgagtggaactgatattagagcactgccttcttccatcaatagtttatatcaattacgtgctctaatactaatagattgctactggttgacagagttaccacctattggtaatctttgcaatttgcaattgcttgattgtcataatacaaggttacatcatctgccgccaggaacggacaagttgacagatctgaggcgtttaactgcaaatcatttgaaaagcatcgacctaggaattcttctcaaattagctagcatggaaatgataaatgtgccgggtacccgtcttgaatcagcttcttttgatgagctctcctctctacagaagctgacctctctttacatcaaattggatagctcatcagtttctaatagagaccacacctggatgtctagattgaaaagatttcaaattgtagttggggaacctctaattcagagttattcctactacgtaccaaggaaactagctatgcctacagttttcaccaactcaccaccagaaataaccatctccgagtgtgaaattttcagtaagggagagctctcaggcatgttgcagtttgcttcaaatttgcgcttggaaaactgcaagggtctcaggaagttgattgcatacgacagttttaatggaataaaagaacttacagtacgttactgttcttgtgatttcaaaccagcagaagaaggaagtggacggtttgaccctctgccaaatctggaaagtctccgcctcaacttgatatttaatttagagagtgtatctgatatcagtcatcttgtgggtctaagattttctaaattacgcagactagatatttccggttgtccaagactgagatgtctctttaacgttggtggagctttttctgtaccgaatcacctggaacatattggaattgacgattgtgatgaactggtagagttgtatgtgcaatgcggctcaagtcagacgacacttgccaactcagaaattccaagagttcggaagttactgttggaagactgtccaagcttaggaacactgggcgagaatacatgggaacacctgcaggaacttaagttgaaagattgtaatcaaataaggaagcttcctctgtctattcaaacctccaagaacatcaaagtaatagaaggacggtcagaatggtggaaccaattggaatgggattccgataacttcaagtcaaatttagagcattgtttccaaccaatttattactgacagaaggatcaaagttgaggctacttccactgcatttcagatgatttaccaataaaacttttagatttctcaatt

SEQ ID NO: 113 - DNA, 2994 bp, Nicotiana tabacum
atggaaataatttttaatgttgtagctggttttgttgttgaggtggggaagaaggtgtgtaaatgcatctatcctaagattgaaaataccgtccgtttcacatcaaatgttgaaagtgtaacagaggaaatggagaatttaagaaagtttagagatgatatcaaagggaaggtggaaggagctgagggagaaggctataaaccaaaaccagaggttctccagtgggtcgaagatgttcaaaagctggagactgactgggaatctatgaaagaagacattgcagcggctaagatggttgcatataaatgttgtccaaattgcagtcttcgctcggaagtctccactcaagcacgaatcatgcgagatcaactttgcgaccttaaaaaaatgggagaaaattttggatccagtttggtggttgaaaattaccaggtgaaaaaagtggagtacatcccaggaccatcaatagaaggccagtcagcagcaacaagaaatctcaacaaaatcctacaactcttagaagatgataaggtatgcatcattggtgtatggggaatgggaggagtcggtaaaacgactttggtgaagaatctgaacaatgagctcctaaagactgctacgtcaagctctaatctgtcttttagtgttgtggtatgggttacagtgcccaaaccgccaacagacataagaaaggttcaagcacaaattgccaacagattaaacctaaaggtagacagtgaggaaagcgtagaacgcattgccagcagaattcatcagaggctcaaggaagaaaagagtttccttcttatactcgatgatgtttggcaagctataaatttggatcatgtaggtgtgccccaacctgaagatcccgcaagaagcaaggtaattttaacttctcgttttgttgatgtttgtaggcaaatgaaaacagacaccgaaatgaaggtgttgacatttgatgaagatgaatcttggcaaatgtttgtcaaaaatgcgggagatattgccaatctggagcatattcaaccagttgcaaaggaaattgcaaaggagtgcgatggattacctttagcaatcactgtcatcggagcatctatgagagggaagaagagggtcgagctttggaaagatgctttggaatcacttagaatgtgtgaacctcacaacacaaatgtaaaagataatgtttacaaggtcattaagtggagttttgattctttagaatctcaggatattgaattatcctcagagcaaagaagcaaacatgtgaacaaaaggggaggtgacattcaaagttgtttcttgtattgctccttatatccagtggctatttcaccagatgatgtcatagattgttggtgggcggaggggttccttggagaacgtaacacatatgaagaagcctacaacaggggaattacaatgattgagattctaaaagatgcctgcttactagaagcccatgagtgggattctgtaaagatgcatgacgtggttcgcgatgttgctatatggatagataattccctgggggataagcacaattctcttattcaagctggacttgggttgtctgagatatcacatattaaaatgtcagcttctgtcaagagaatgtcttttgtaagcaacaaaattgaacgtttacctgattccttcatggagtgcccagagacaacaactttacttttgcaagacaattgttgtcttgtggaaattcccgatacgttctttttggcatttccagccctaagagttttgaatctgagtggaactgatattagagcactgccttcttccatcaatagtttatatcaattacgtgctctaatactaatagattgctactggttgacagagttaccacctattggtaatctttgcaatttgcaattgcttgattgtcataatacaaggttacatcatctgccgccaggaacggacaagttgacagatctgaggcgtttaactgcaaatcatttgaaaagcatcgacctaggaattcttctcaaattagctagcatggaaatgataaatgtgccgggtacccgtcttgaatcagcttcttttgatgagctctcctctctacagaagctgacctctctttacatcaaattggatagctcatcagtttctaatagagaccacacctggatgtctagattgaaaagatttcaaattgtagttggggaacctctaattcagagttattcctactacgtaccaaggaaactagctatgcctacagttttcaccaactcaccaccagaaataaccatctccgagtgtgaaattttcagtaagggagagctctcaggcatgttgcagtttgcttcaaatttgcgcttggaaaactgcaagggtctcaggaagttgattgcatacgacagttttaatggaataaaagaacttacagtacgttactgttcttgtgatttcaaaccagcagaagaaggaagtggacggtttgaccctctgccaaatctggaaagtctccgcctcaacttgatatttaatttagagagtgtatctgatatcagtcatcttgtgggtctaagattttctaaattacgcagactagatatttccggttgtccaagactgagatgtctctttaacgttggtggagctttttctgtaccgaatcacctggaacatattggaattgacgattgtgatgaactggtagagttgtatgtgcaatgcggctcaagtcagacgacacttgccaactcagaaattccaagagttcggaagttactgttggaagactgtccaagcttaggaacactgggcgagaatacatgggaacacctgcaggaacttaagttgaaagattgtaatcaaataaggaagcttcctctgtctattcaaacctccaagaacatcaaagtaatagaaggacggtcagaatggtggaaccaattggaatgggattccgataacttcaagtcaaatttagagcattgtttccaaccaatttattactga

SEQ ID NO: 114 - protein, 997 aa, Nicotiana tabacum
MEIIFNVVAGFVVEVGKKVCKCIYPKIENTVRFTSNVESVTEEMENLRKFRDDIKGKVEGAEGEGYKPKPEVLQWVEDVQKLETDWESMKEDIAAAKMVAYKCCPNCSLRSEVSTQARIMRDQLCDLKKMGENFGSSLVVENYQVKKVEYIPGPSIEGQSAATRNLNKILQLLEDDKVCIIGVWGMGGVGKTTLVKNLNNELLKTATSSSNLSFSVVVWVTVPKPPTDIRKVQAQIANRLNLKVDSEESVERIASRIHQRLKEEKSFLLILDDVWQAINLDHVGVPQPEDPARSKVILTSRFVDVCRQMKTDTEMKVLTFDEDESWQMFVKNAGDIANLEHIQPVAKEIAKECDGLPLAITVIGASMRGKKRVELWKDALESLRMCEPHNTNVKDNVYKVIKWSFDSLESQDIELSSEQRSKHVNKRGGDIQSCFLYCSLYPVAISPDDVIDCWWAEGFLGERNTYEEAYNRGITMIEILKDACLLEAHEWDSVKMHDVVRDVAIWIDNSLGDKHNSLIQAGLGLSEISHIKMSASVKRMSFVSNKIERLPDSFMECPETTTLLLQDNCCLVEIPDTFFLAFPALRVLNLSGTDIRALPSSINSLYQLRALILIDCYWLTELPPIGNLCNLQLLDCHNTRLHHLPPGTDKLTDLRRLTANHLKSIDLGILLKLASMEMINVPGTRLESASFDELSSLQKLTSLYIKLDSSSVSNRDHTWMSRLKRFQIVVGEPLIQSYSYYVPRKLAMPTVFTNSPPEITISECEIFSKGELSGMLQFASNLRLENCKGLRKLIAYDSFNGIKELTVRYCSCDFKPAEEGSGRFDPLPNLESLRLNLIFNLESVSDISHLVGLRFSKLRRLDISGCPRLRCLFNVGGAFSVPNHLEHIGIDDCDELVELYVQCGSSQTTLANSEIPRVRKLLLEDCPSLGTLGENTWEHLQELKLKDCNQIRKLPLSIQTSKNIKVIEGRSEWWNQLEWDSDNFKSNLEHCFQPIYY

SEQ ID NO: 115 - DNA, 7450 bp, Nicotiana tabacum
atcaatgtttgtaattgcatatgtattgcttttaactcgatgagaagcaaagtgaagagtcaaaacaattgctacgtgacgtttttaaaataattgtccaaaaattgtctgttgaaaatgataaaaagtaaacaattgtccatcttagtctcacctgtatttgtccattcaaatacatatgcaatttcttgagatttgactgcgctaacaaaattcctgtgttgcttgaagcttccaaaacaaaggtctctcgcaatgagaacttggctaaacttcaagctggttacctttttcctgaggtctgtattttagatggtacttttttattgagttgattgttgttattttgtttatttaagctactttgcaattaaagatgctttttatattgaattagcagtaggggattagagaagacgttagacacattgcttggaataaattggaggcatttcttttgtgcccatgcaaataaaagattaatttagatgatatagcagtaatgtggaattacgatgagacaaagagcagatttagttcccttaagcaaaattatttgctttttaagctggatgttggttttttgattttataccgccattacccctctacgcttccatcttgaaataggggaaagaagacactttatagtaatacactaaaatttaatttgtagacattctctcctacttaataggagttaagttataaacaatctctctttggtgaagttagatcgcaagaaggagatctgcacacatgttgaaacaccctgatgctcaaattataagccttggaattggtgacactactgagcccattcctgaattcataagttctgccatggcacaggtaatgctgatagccttgtttgtgaattttgtaaagataggatacaatttctgatgttcaggggtcatttgacatctctatcacgctgtagtgttttgttattagtcaaacttcgttttttgctgtatgtcgtatcttgttctgttgaccgatgataggactactcgaaaaagtcatgtatctggtaacgtttggttctataatgaacatgtttctggatatttgtgttgatagaattcagcacgcctacatggactgccatttaacttgacaattagtttgtatttttaatctattctgcttattgaactctaagtcataaccaacttcctgttcttgattttgttttcttttactctactcattggcagagagcacatgacctgtcaacattaaagggttacagtggttatggtgctgagcaaggagaaaaagtaagtagcggatttcatccccccaatacccccctatttttgtaatatgatattaggtctattgtttatcgttcatttcttaattctcttccattttttgctacaagaataaatggtattttgcatgtgcgctgatagtttgtctttcctctatttatccggttcattttgtatcttctttcctcaaatgcattactatcttctttgtccggtggtccacgcggtagagtgaaaacttcctcttttggcataactagtttctctacacgagtattccatgtcaattagtgcagactttttgaaatattatataatattaaaacatatgtataatgagtaccataaaatttaaaggaaaaaattacaagctcaaattgttgtgcaatctgcatatttgaatgacttaattattgaccgctagtcttttggaaacagcctctctaccccttcggggtaggggtaaggtcttccccatttcaatgccgcaaagaacttgacaattatcaaagcaatataatcatcttttcacacaattctgcactaaacccatacatcaccatttcgaggctatatcagattttgacgttattattttttaaaaaaaaaaactcaactttaccctacaattcttatcaaatgataatatggtaaggggtaaccatccagttaatattgttgaagtaatattgttgaaacccatacatcttatcaaaagaacttgataatatgttttatgatattgttgatattgatatctctcccagtaataaattttaaaagcataaaaagtaagttgtcaaaaataaagtcacaccaacacaagcaaaatttatcttaacgaaactgaatgactaatgctcgtataagaagtgttcattacaattttaaagcaaatataattacctgaaacttaaaagatcaatatgtgatattaatcatggttagataaaagttaattaatcaaactttaacaataataaaagaagccaaaagataattaagaaatgttcccagttgaaatgaatcctttaaaggagagagagagtgagagagcttaaacaaaataatagagtatcagtctccaacaaaaaaaaaaatcatgagatcaaaattgtgtcatccaacatccgcccactaatccaacatgtgatccatacaatccatgactatttatttttcattctttcataacctcctcctcttcgttccccatatatatgttagtacttgattttggtagatgaatcagatcttgtatttaattatttaattaatgcgatttattatttagtagatgaatttggtctagagaatattgcttaaggtaatagttgaaagggtagttaaaaggtaaaagaatagcaagattaatcaactaagattacatttgacaataaccaataagtaaaaggaaaaagaaaacagaaaaataactttagcatggtcaatagaggctatttagtgaagaggcaacgggagtagaaaacaataataaaacatggagagaaaaaattaagtaccaagggaggagcccttgtggccacagacaactgaaaccattattaatcgaacggacaaaagagcaaggatacaaatggtatgaaagagatcagttttataagagaggtgctattgaaagtttcatcagaaaaaacttgctttgtggcttcaaactccaggaccatacatgtatcacaaataaaaaaaatttagaacaaagaaaccttgtcctagttaaattgttgaaaagaaaatgagaacttactcacgagtaaagacatctgcaaccagaatagcacagatgcaagcataatcattgattactttctaggatgaaaattgggaaagatagaagcttgatcaagaagcacttcatctgcttgttcttcaagccaggaaatgaaaactttatgaacaatcatcctaaccagatcaacttccacaaatctggttggaaatacaaaaagatatcaccaaccaatttcagaggatataaaagatgttgtacattatacaaaatatgtatattcaaatgagtagtgggaagaggcaaactgaataaacttgagagaatacaaaaagatatctcattcagatgcctttctttaatccatctttattgcataatcaaaagtacattaaaaactttaagattgagaattccaaacgattggattagacttgtattacactatttatgtctaattatttattagaatacacatttacatttttgtacaaaaatattattggagtatagtttaagtgaaggggtagaaagataattcaacttttgaaggatattttggtaaatcaatttctactttagagcttcccatttataatatagtatgatgatgatatactgatgtctaaaaggcatgcacagctggaatttccgaagcatttaaaatcatttccatatattatatcaacaataatctattactgctttgtaattagcatttattcaacacttagtttgcctaccaaggtgttagaaaaaaaaaaagcgaatgtgcaatgacatgtttcatgtttggctattttcaagtggttattctggagacttatagcccgtttggccaaactgcaaatatcaatttattttgagaagtactttttctcaaaagtgcttttctcaaaagtacttttggtgagaagccgtttgtgtttggctaattaatttgaaaaacacttctgagcagcaattagtgtttggccaagctttaaaaaattgcttctaagtgtatttttctcaaaagttcttttaaaaaaagtgcttttggagagaagctacttttttttctgcttctcctcaaaagtactcttttccctttcaaaagcttggccaaacactttaattttagaaaaaaaccacttttgacaaaaaaaaagcgcttttaccttgaaagtagcttggccaaacatgctactttaagacagacataagagaaaattactctatggttaccgtatgttttgttcgtggcatttcatcggtgatttaagtgtaaagtaagaatggcgttgatttttttccgcatgagcagcaacttagagcctccattgcttctaccttttatgcaaatgttggaatagaggaagatgagatcttcgtctctgatggtgccaaaagtgatatatctcggcttcaggtttggttttctctttatcaagtggtcttttcaaattataactgacgtctttgagtctttcactaacagttttttgtatttcttgactgtatcttaggttctttttgggtctaatgtcactatggctgtgcaagacccatcgtatccggtaaaatcttcaggcttttacctatattcttccatgtttgacaaaaaatgaaaaatgcccatccaggattcctgcatattgttgatttgctatgtctattttgttaaatgatttttcatatcattgtgagatttaagtgaagtggtacttgtttataacttagcacgaacttttatactcttgtataggctattgatacatcttttatactcctgttatttgttaggctctttatagtctgttggagtattcttgctttctttacctctctttggagaaaggctctcatatctgatgatgtgtgtaagattctgatgtaagccttgattgttgtttctactgtaggcttatgtggattcaagtgttattatgggccaaactggtcagtttcagaaggatgtggagaagtatgggagtattgcatacatgagatgtactccagaaaacgggttctttcctgatttatccagtgttcctcggacagatattatatttttctgttcgcctaataatccaactggtgctgcggcatcaagggagcagctgactaaattggtgcattttgctaaaaacaatggctcaatccttgtttatgattctgcatatgcaatgtatatatgtgatgacagtccaaagtccatctttgagattcctggagccaaagaggtaagtctggatcattttatttggtcaacattaagctttacattcttttctagtgaaagcttctgctatcatttgttcagaccctgtttttagatgactaaagctcatgatgcccgcatatcactttgtttggttgctctttttaatccaatgacaaccatacatcaatcctcagctagttagggtcggcatatgcggtctcactattgattttgctctatctggacctgtttcattctggtattcattaatttcctattgattagttgcatgaatcgtttgcatatggtggctaaacttgcaatatactcttattctaaaattgttattctctagtgctctccatagttcagactttcggttaacaacaccctcactagttttgtcagttacctcaatatcatttgcaattaacatactaggggatccaaaatgtagtgttagggctatacgctctagtccttacatgtctattttcctcttcagtgaactgtctaaaaacggaccacaacttgaaaagtttccatcttggcttgcttcagaaaggatagaaaagatagtgagaaagtagaatgccattgcaaatagcgaagacctcatcctgtatgctatcggttagctcatccataatgaggatcaacaagtataggctcaatgcagatcttcatggttatggaaaactcttttgtatctcctaccactattctcacgcttgtgcggctctttcacatatatcctttatgacttttttatatttttatatggattcctttcttctcctacagtctctttctaatctttactgtggaaaaataacatgagcagtctgttcaattgaagatttttagctcgtttattatcattcatgcaattagttgggacctttccttctaattcatcttcttgtcctgctccttcattgtcttttgccatagttgaagctcatcaaactagtttgtaagtggtcttccaagtcatcttctttccatgttcttcaatggcactctgtagtaaggttatctcaagtctattatccaagtgcttttatcccctggttaattgcagggactttcttctgatccttcttgctcccttgcatgtctttttcagttacagagcttcttagagagtcgtcatatttcagttagacttttttgtgctgctttttctccttacctctgtggtctacagagtttattgcatgattctctacattaataagtggatttgtttctcagtaagcatattgtactggacttgcaggttgccattgaggtttcatcgttttcgaagtatgctgggttcactggagttcgtttagggtggactgcaattcccaaagcactcctatattctgatggatttcctgtagcaaaagacttcaatcgcattgtttgtacaagcttcaatggtgcatccaatatcgctcaagctggcggtctggcttgcctttcacctgatggtttcaaggtcagtttcaacatttgcttgtcgtttccctgttcacttaataaaaaataacatcatttaataggcccaagttctctgcttgaacatgttgactttgcatcacaggccatgaagaacgtggttagtttctataaagaaaacacagaaatcataatggagacatttaagtcgctaggttacaaggtgtatggaggtaaaaatgcaccctacgtgtgggttcacttccctggacgaagctcatgggaggttttcagcgagatacttgagaagactcatgtcgttaccacaccaggcagtggttttggtcctggtggtgaaggttttgtcagagtaagtgcatttgggcacagggataacgtcgtagaagcttgcagaagattcaaggaattgtacaagtgaagtaactcgtacgcctgcatgtctgtgaaaacatgcaggtaaattgttaaacacttttggccgccttcagaggcttcattcagatgctataggctgtatcttgaacgctcaaacattttgatcctttatggaatttgtttctttggaagaataagcttattctgtgattgccagtgattggttcctctttgttatctcttgtgaagattagattcttcatatacagttagttataacttatacgcataatggacactgatcatcatgaatttaaagggaaggaatagttgaaacaaaataataggttttcccgtgttgaaatt

SEQ ID NO: 116 - DNA, 1134 bp, Nicotiana tabacum
atgttgaaacaccctgatgctcaaattataagccttggaattggtgacactactgagcccattcctgaattcataagttctgccatggcacagagagcacatgacctgtcaacattaaagggttacagtggttatggtgctgagcaaggagaaaaacaacttagagcctccattgcttctaccttttatgcaaatgttggaatagaggaagatgagatcttcgtctctgatggtgccaaaagtgatatatctcggcttcaggttctttttgggtctaatgtcactatggctgtgcaagacccatcgtatccggcttatgtggattcaagtgttattatgggccaaactggtcagtttcagaaggatgtggagaagtatgggagtattgcatacatgagatgtactccagaaaacgggttctttcctgatttatccagtgttcctcggacagatattatatttttctgttcgcctaataatccaactggtgctgcggcatcaagggagcagctgactaaattggtgcattttgctaaaaacaatggctcaatccttgtttatgattctgcatatgcaatgtatatatgtgatgacagtccaaagtccatctttgagattcctggagccaaagaggttgccattgaggtttcatcgttttcgaagtatgctgggttcactggagttcgtttagggtggactgcaattcccaaagcactcctatattctgatggatttcctgtagcaaaagacttcaatcgcattgtttgtacaagcttcaatggtgcatccaatatcgctcaagctggcggtctggcttgcctttcacctgatggtttcaaggccatgaagaacgtggttagtttctataaagaaaacacagaaatcataatggagacatttaagtcgctaggttacaaggtgtatggaggtaaaaatgcaccctacgtgtgggttcacttccctggacgaagctcatgggaggttttcagcgagatacttgagaagactcatgtcgttaccacaccaggcagtggttttggtcctggtggtgaaggttttgtcagagtaagtgcatttgggcacagggataacgtcgtagaagcttgcagaagattcaaggaattgtacaagtga

SEQ ID NO: 117 - protein, 377 aa, Nicotiana tabacum
MLKHPDAQIISLGIGDTTEPIPEFISSAMAQRAHDLSTLKGYSGYGAEQGEKQLRASIASTFYANVGIEEDEIFVSDGAKSDISRLQVLFGSNVTMAVQDPSYPAYVDSSVIMGQTGQFQKDVEKYGSIAYMRCTPENGFFPDLSSVPRTDIIFFCSPNNPTGAAASREQLTKLVHFAKNNGSILVYDSAYAMYICDDSPKSIFEIPGAKEVAIEVSSFSKYAGFTGVRLGWTAIPKALLYSDGFPVAKDFNRIVCTSFNGASNIAQAGGLACLSPDGFKAMKNVVSFYKENTEIIMETFKSLGYKVYGGKNAPYVWVHFPGRSSWEVFSEILEKTHVVTTPGSGFGPGGEGFVRVSAFGHRDNVVEACRRFKELYK

SEQ ID NO: 118 - DNA, 4373 bp, Nicotiana tabacum
atggaaataatttttaatgcagtaggtggttttgttgttgaggcggggaagaaggtgtgtaaatgcatctatcctaagattgaaaatactgtccgtttcacatcaaatgttgaaagtgtaagagaggaaatggagaatttaacaaagtttagagatgatatcaaagggaaggtggaaggagctgagggagaaggctataaaccaaaaccagaggttctccagtgggtcgaagatgttcaaaagctggagactgactgggaatctatgaaagaagacattgcagcggctaagagggttgcatataaatgttgtccaaattgcagtcttcgctcgcaagtttccactcaagcacgaatcatgcgagatcaactttccgagcataaaaaaatgggagaaaattttggatccagtttggtggtagaaaattaccaggtgaaaaaagtggagtacatcccaggaccatcaatagaaggccagtcaacagcaacaagaaatctcaacgaaatcctacaactattagaagatgataaggtaaactaattgttgaacttaaaccaattttttgctctagtttgctaaaattcttctttataatcaattttccatccatgacttgtgggtaaatttctttttgggtaatttgaatcctttcaggtatgcatcattggtgtatggggaatgggaggagcggcaaaacgactttggtgaagaatctgaacaatgagctcctaaagacgtgaagctctaaactgtcttttagtgttgtgatatgggttacagtgcccaaaccgccaatagacataagaaaggttcaagcacaaattgccaacagattaaacctaaaggtagacagtgaggaaagcgttgtacgcattgccggcataattcataagaggctcaaggaagaaaagagtttccttcttatactcgatgatgtttggcaagctataaatttggatcatgtaggtgtgccccaacctgaagttcccgcaagaagcaaggtaattttaacttctcgttttgttgatgtttgtaggcaaatgaaaacagacaccgaaatgaaggtgttgacatttgatgaagatgaatcttggcaaatgtttgtcaaaaatgcgggagatattgccaatctggagcatattcaaccagttgcaaaggaaattgcaaaggagtgcgatggattacctttagcaatcactgtcatcggagcatctatgagaggcaagaagagggtcgagctttggaatcacttagaatgtgtgaacctcacaacacaaatgtaaaagataatgtttacaaggtcattaagtggagttttgattctttagaatctcaggatattgaattatcctcagagcaaagaagcaaacatgtgaacaaaaggggaggtgacattcaaagttgtttcttgtattgctccttatatccagcggctattttaccaaatgatgtcatacattgttggtgggcggaggggttccttggagaacgtaacacatatgaagaagcctacaacaggggaattacaatgattgagattctaaaagatgcctgcttactacaaggccatgagtgggattctgtaaagatgcatgacgtggttcgcgatgttgctatatggatagataattccttggggaagcacaactctcttattcaagctggacttggattgtctgagatatcacatattaaaatgtcagcttctgtcaagagaatgtcttttgtaagcaacaaaattgaacgtttacctgattccttcatggaatgcccagagacaacaactttacttttgcaagacaatcgtggccttgcggaaattcccgatacgttctttttggcatttccagccctaagagttttgaatctgagtggaactgatattagagcactgccttcttccatcaatagtttatatcaactacgtgctctaatactaatagattgccgcgggttgacagagttaccacctattggtaatctttgcaatttgcaattgcttgattgtgatgatataaggttacatcgtctgccgcaaggaatggacaagttgacagatctgagttgtttaactgcaattcatttgaagagcatcgaccaaggaattcttctcaagttggcaagcattgaaatgatagatgtgctgggttgccgtcttttatcaacttgttttgatgagctctcctctctacagaagctgacctctctttacatcagattggataggtcatcagtttctaatagagaccacacctggatgtctagattgaaaagttttcacattgtagttggggaagatttcacttggatgcctgtagaattctacagttcaccaaggactataactatctccaattgtgaaattttcagtaagggagagctctcaggcatgttgcagtttgcttcaaatttgtacttggttaactgcatgggtctcaggaagttgattgcatacaacagttttagtggaataaaacaatttatagtacattactgtgattgtgatttcaaaccagccgaagaaggaagcggacggtttgaccctctgccaaatctggaatatctctgcctcgccgggataaataatttagagagtgtatctgatatcagtcatcttctgggtctaagattttctaaattatgcagactagatatttcggattgtcatagattgagatgtctgtttaacgttggtggagctttttctgtaccaaatcacatggaacatattaaaattcactattgtactgagctggtagagttgtttgtgcaatgcggctcaagtcagacgacacttgtcaactcagaaattccaagagttcggaagtttctgttgagtagctgtccaaaattaagaactctaggcgagccagagaatatgtgggaacacctggatgagcttagcctgacaaattgcaaccaaataaagaaactgcctctgtctattcaaacttccaagaacgtcaaaggaataagaggagaatcaaaatggtggaaccaattggaatgggattccgacaacttcaagtcaaatttagagcattgtttccaaccagttcaatactgacagaaggatcaaagttgaggctacttccactacatttcaggtgatttaccaataaatttttagatttctcaattatgaaaatgtttggtactatacttgattattcgcccactagcatccttttaaaaaaactaataatttgggcattgattttgtactatttctttttgttcgaaagtgttcataatgttccgagacttcttcatttatttgaggaaactacactaactgcccacaaaacctaaaataataacccaataataattactatacatacctaactcaaccaaaattattacccgtccacccatttgtcaattgccttaccaacctctctcctcctttaagcttccctttcccctttcccttcttcccgtttcttctgaagaagcaagcaacaaaatactctaatcccttcttccctcaattaatgaaaaactaaaaaaaaaaatactccctctctttctccaccaaaacgttcccagtccccccaccaccctttcatccctccccgcttctctatcttccactttcttcttcctcccaatacaccccctctgtcaaatctcctcatattcttttcacaatttcacaatctactaatgaaacttttatgttcaaaaattcaaacacaacagccatgtatctttgtcccctctattaagaacgaaagagtcttttatttactggggttcaacaattattagtaaaattaatatagtccctccccaaattatcgatctactaatgtgaaaagttaccttttttttgcacgtgtatgtttctctctaatcttgtgtatatatacaaaatatttcacttttttttattgatttctaatttgatgggttaggtctagaaaacttaaaaataccgaaaaagtttcgaatcatgagctttgtttaattttctacggtgttcaagctgtttttaaagactgaaatacagagcaacttgaaatattttttgaaaccgaaaaagataatagtagatgggttgtttttctatatggtgatgggaggaggaggaagaagaagaaagagagaggagcgcgttttggggggaggggggttggggcactggggaacggtttggtgaatggagagagagggagtattttttttagttttaaattaattgcggtcccacaggtgccatttggcaagcaattaatgccctcactcaaatattacatggcatatctcactcaaaataaaatttctcgtgcttttaagaagtgagcagttcgacaataaatgaagcttcacgacctatactagaaaaacaaggcgtcggaccagtttag

SEQ ID NO: 119 - DNA, 1812 bp, Nicotiana tabacum
atgtgtgaacctcacaacacaaatgtaaaagataatgtttacaaggtcattaagtggagttttgattctttagaatctcaggatattgaattatcctcagagcaaagaagcaaacatgtgaacaaaaggggaggtgacattcaaagttgtttcttgtattgctccttatatccagcggctattttaccaaatgatgtcatacattgttggtgggcggaggggttccttggagaacgtaacacatatgaagaagcctacaacaggggaattacaatgattgagattctaaaagatgcctgcttactacaaggccatgagtgggattctgtaaagatgcatgacgtggttcgcgatgttgctatatggatagataattccttggggaagcacaactctcttattcaagctggacttggattgtctgagatatcacatattaaaatgtcagcttctgtcaagagaatgtcttttgtaagcaacaaaattgaacgtttacctgattccttcatggaatgcccagagacaacaactttacttttgcaagacaatcgtggccttgcggaaattcccgatacgttctttttggcatttccagccctaagagttttgaatctgagtggaactgatattagagcactgccttcttccatcaatagtttatatcaactacgtgctctaatactaatagattgccgcgggttgacagagttaccacctattggtaatctttgcaatttgcaattgcttgattgtgatgatataaggttacatcgtctgccgcaaggaatggacaagttgacagatctgagttgtttaactgcaattcatttgaagagcatcgaccaaggaattcttctcaagttggcaagcattgaaatgatagatgtgctgggttgccgtcttttatcaacttgttttgatgagctctcctctctacagaagctgacctctctttacatcagattggataggtcatcagtttctaatagagaccacacctggatgtctagattgaaaagttttcacattgtagttggggaagatttcacttggatgcctgtagaattctacagttcaccaaggactataactatctccaattgtgaaattttcagtaagggagagctctcaggcatgttgcagtttgcttcaaatttgtacttggttaactgcatgggtctcaggaagttgattgcatacaacagttttagtggaataaaacaatttatagtacattactgtgattgtgatttcaaaccagccgaagaaggaagcggacggtttgaccctctgccaaatctggaatatctctgcctcgccgggataaataatttagagagtgtatctgatatcagtcatcttctgggtctaagattttctaaattatgcagactagatatttcggattgtcatagattgagatgtctgtttaacgttggtggagctttttctgtaccaaatcacatggaacatattaaaattcactattgtactgagctggtagagttgtttgtgcaatgcggctcaagtcagacgacacttgtcaactcagaaattccaagagttcggaagtttctgttgagtagctgtccaaaattaagaactctaggcgagccagagaatatgtgggaacacctggatgagcttagcctgacaaattgcaaccaaataaagaaactgcctctgtctattcaaacttccaagaacgtcaaaggaataagaggagaatcaaaatggtggaaccaattggaatgggattccgacaacttcaagtcaaatttagagcattgtttccaaccagttcaatactga

SEQ ID NO: 120 - protein, 603 aa, Nicotiana tabacum
MCEPHNTNVKDNVYKVIKWSFDSLESQDIELSSEQRSKHVNKRGGDIQSCFLYCSLYPAAILPNDVIHCWWAEGFLGERNTYEEAYNRGITMIEILKDACLLQGHEWDSVKMHDVVRDVAIWIDNSLGKHNSLIQAGLGLSEISHIKMSASVKRMSFVSNKIERLPDSFMECPETTTLLLQDNRGLAEIPDTFFLAFPALRVLNLSGTDIRALPSSINSLYQLRALILIDCRGLTELPPIGNLCNLQLLDCDDIRLHRLPQGMDKLTDLSCLTAIHLKSIDQGILLKLASIEMIDVLGCRLLSTCFDELSSLQKLTSLYIRLDRSSVSNRDHTWMSRLKSFHIVVGEDFTWMPVEFYSSPRTITISNCEIFSKGELSGMLQFASNLYLVNCMGLRKLIAYNSFSGIKQFIVHYCDCDFKPAEEGSGRFDPLPNLEYLCLAGINNLESVSDISHLLGLRFSKLCRLDISDCHRLRCLFNVGGAFSVPNHMEHIKIHYCTELVELFVQCGSSQTTLVNSEIPRVRKFLLSSCPKLRTLGEPENMWEHLDELSLTNCNQIKKLPLSIQTSKNVKGIRGESKWWNQLEWDSDNFKSNLEHCFQPVQY

SEQ ID NO: 121 - DNA, 9049 bp, Nicotiana tabacum
ctcagtggtcccacccgccatttcctctccttttccagctttatcgatttgcaatggcgaagctcaaaggagcaaaaaaattcttcagatacagagaaatggaacgaattgttcaacgccttagttcacatgttgcaaaaccagcagactcgggttgaatcattcgtcaaagagagaattttctgaagatcgaatcaaattacaacctaatcgatgatgttaatgtgtttcaggaacaaattttatcaggttaattttcttttcttctggtttggtattttagtaattgatttagggttttgattgattgaagtttagagctttcttggtaaatttgggttctttgaaattatgttaaaaaagttaaaagaatggatcacatagattcttgtggtactttaaaaggaaaattcaaatagattttgtaagattaaatattgaaggcatatattataaaaatgagaaaagccctcgcttcagtcttgtctctagaataaaggaataaaaagatttaagcttcttatattagttattatataatccaaaattctcttgctgtggactttccttttctgcttttcctttctatatgtttgctttgtcaattaaatagtagaaaaaagaaaatggttgtcccatctcacaagactgaagaggctccacaacaattgtttaaaattcattgaagattttcctggaattctgccttacagctcgcttagatggttgttatgtatgatgatgcatcgtatagtattatattatattatactgaactgtatcgttttattattatacaatatttggttagattgtattgattgttgtcattgcatgatgttatgcaccaacaatatgaagaataaacttgcaatattataaagaataagaaaggtaagagatagaattattatataaaaaggtagggtaaataataaagtagaactatttaataataaggaaggacaagataagagaaaaaaataaggtaacaacgcgaccacaccaaatcggtcgttccataaagtgacactttccattattatgtaacaatggatttaacgatacggtacaataaaatttaagtaacaataaaaataaatatcgtatttaatataacaatacgatacaatacaataggtaacaaccatccaaacaagttcttaaataaagaaggaaaacggagcactgagccattcctcttgcaacctctgattaggagtggatggatagaaaaaacttatccgcaacaaaatttggtggtagaaaattaccaggtaaaaagagtggagtttatcccaggaccatcaattgaaggccagtcaacagcaacaaaaaatctcaacgaaattctacgattgttagaagatgataaggtattgttcgaattaaagagttaatttctcaaattgtcatttctcaaattgtcattcagtttaagctaattatgaagtatagatacttttcttttaaattggtgaaagaaatatcttttcggaaaaaaaaattctttttattacaccaattttttttttccacttatttgtttctcaaatactggtttcttttatttggtgaaaattttatttatcgattaacaatagttaagtaacatagtgacatgtgtttccactagactgaagcacctcatttgtccaagcggtgtcactcaatttagtttatctgttatttattcttttaatttatcatttaaaaattatttaatgatttttttttgcgaagcagtgtcacgtgacaccaaccccatgtgtatccgccactggttggctctatagctcatagggaacaaaatgttaagtgacaatataaggtaagaaatgactaatgttgagttatattttacaatatataacttaatgtataatagaaatataagaaactattatttgttgaaataatgcaaaaggaaaaggtgataaatgtcaactcatttggaatatattttaacatctacatttcaatattcttgttccgtcaagtttgcatttttaccaatttgacttttaggaatatacaataatcaattttgctctactttctaaatttattcaccatcaatgctctttttatggaaacaagttaatatacctgatctacttgaaaaataagtttacttgtatgataatattggaaaatgactaaagttaattcttttgctaattagttaatccaaaattatttgagtaggaaatatgttcaaatacatacatacatatctatatctatatatacatacatatatatatatatatagagagagagatatttaaagttctaagtgttaagacttcctatatagttcaaagaaggaagaatctataattaaaaattagttttttttaaagtcctaaatattagaaaattagcatggaaattatagttatgttacatagttcaaataaggaaaagatttatataagataaaatctaaatcgactttaaaattttaaatattaggacttcctatgtaactcaaataagaaaagatttaataatcatagttttagttaattttaaattcctagatattagaaaaataattaaattataattttgtccaatggaaaatatattttacagggttaaaaggtcgaccactatttagtgttgaggtttcgtgctatataatggtactaatctctgggtacgtgcattgcacatgtatccttattaatgataataaataaaaaaagacacataaataatattatgtcaaaatgtatttgagttataaactaaaaaatcaaataaaaaggtatgtgttgcacatgtatttagttgaatttgaaggtcgtattattcaggaatatcttaagaaaattattgttattttagatataatactgaatctaaaataattagatatttgttatatacttttaaatcaataaatattatactaaaaattgtatttgagttattaaaataaaagcgtaagttcttaaaaataataaatgttctttctttatacctaactcaacaaaggaaaaaactaccctatagaagtcctcatccccttattttttgcctgttaatgagtaggaaggaattcttgactaactcaaatttaaaaataataaacgaaaaaaagaagaatacgctaagtgtgtttagttttaggattctttcacaactgtaatcactacgttaatgttgggaataagccccctacaaaattaatattcacggtaataaaagcggaataataacgtagcaccgagatacgataattaacaagaataaaagagtaacaatgacaccaagatttttacgtggaaaaccattttgaataagggaaaaaaccactgtcccgagaggaacaactgatatcactatagtaaggaattttactctttataggtccgagtaaaatactcaaaagaccactacaacactcaaaaagaaataactctcttttgatattcccacctcactacaatatcactcactctctatttttctcacagactattttcttataccctgtctgtgaaaccttactctttctttctctcttttgttggtgtatcttacaatgaaggtagagacacttatttatagctgcagaatacctatgttgatgtatacatcaacactactacaaaaaaatcagccgcccaaatcttttctaaattggctggcttgaccaaaggaagaaagaacaagcttttcttctttcacatatgggctggaccccaccgttaatacaatcctgaaaggagttttatggaattcatgttaaaattagaaaaagaagttgatctcttagctaattgcaacgttttttttctcatgtctatattcagttcctattaaaattaggacttcccaaacatataattctagtttaattgggcaattttttttgtttgttttatattttctgaaaacatgttttatggaaaacaattagcaattcataaccttaaactatataaatatttaaataataaataaaagaaaagaatgagctttttaaaaatttaattataattaatttatgtaattttttcccctctagactaaaagctctaattttcttcctgttgtgactctttacacctataagttgaccaatggatttacaatgtagcaatttgtttcagtttaggatgggtctgacatatattcttaaaaaaataaataatcggatgcaactttgtgtgtcagtttatgctttatgcacacgaggataaaaaaacttactcgaaaaatactcatttcgtacaccagtacagtcgtgattttttttgaaagtgcttatagagaaggatctagattaagctaaattaatatattcaatcgatcctgaagtgaaggtttcagctgcagatttttcttaatcatataactgggatcaatctattactatcatcatctttaaaatccgaacaagtgagctaaaccaatgtctttttttttgaatctttcaaatgacatattctgacggtaagcaacctccatttccaaccaagaggttgtgagtttgagtctccccaagagcaaggtgggaagttcttggagggaaggatgccgcggtctattttgaaacagcctctctaccccagagtaggggtaaagtttgcgtacacactactctcctcagaccccactaagtgggattatactgggttattgttgttgttatttgttgacgaatccctagacttttacctttaagatgtctttaaattcataaaccgttaggaattcctacacagttcaaataaagaaatatttgtaatgcgaatttttagttgattttaaagttctaaaaaattaggaaagtaagtacaaccattctgtccaatttgaaatctatttttaatggttaaaaaagtggatcaacatttatggatcttcgtgcttttataatagtatatagtgtagatagataaatgagggctactatatcttttctttaggtggtagtggagattaagttgaaatagttcaactaggagattacaacaacaacccagtataatcccactagtggggtctggggagggtagtgtgtacccagaccttacccctaccctagggtagagaggctgtttccaatagacccccgacatccttcagctaggagattatgaatgaataatcaaagcttatgcctcttttctgtaagtttctagattccttttgtaaagccattgttgcatctttcatttggtaaattatttttttgggtatttgaatcctttcaggtatgcatcattggtgtatggggaatgggaggagtcggcaaaacgactttggtgaagaatttgaacaatgagctcctaaagactgctgcgtcaagctctaaactgtcttttagtgttgtggtatgggttacagtgcccaaaccgccaacacacataagaaaggttcaagcacaaattgccaacagattaaacctaaaggtagacagtgaggaaagcgtagaacgcattgcaggcagaattcatcagaggctcaaggaagaaaagagtttccttcttatactcgatgatgtttgggaagctataaatttggatcatgtaggtgttccccaacgtgaagatgccgcaagaagcaagataatttttactactcgttttttcgatgtttgtaggcaaatgaaaacagacaccgaaatgaaggtgttgacatttgatgaagaagaatcttggcaaatgtttgtgaaaaatgcgggagatattgccaatctggagcatattcaaccagttgcagaggaaattgcaaaggagtgtgatggattacctttagcaatcactgtcatcggagcatctatgagagggaagaagagggtcgagctttggaaagatgctttgggatcacttagaatgtccgaacctcacaacacagatgtaaaagataaggtttacaaggtcatcaagtggagttttgattctttagaatctcacgatattgtattatcctcagagcaaagaagcaaacatgtgaacaaaaggggaggcgacattcaaagttgtttctagtattgctcctgatatccagcggctatttcaacagatgatctcatacattgttggtgggcggaggggttccttggagaacgtaacacgcatgaagaagcctacaacaggggaattacaatgattgagattctaaaagatgcgtgcttactagaagcccatacgttgaactctgtgaagatgcatgacgtggttcgcgatgttgctatatggatagctaattcctttgggggtgagcacaattctcttattcaagctggaattgggttgagtgatatatcacatattaaaatgtctacttctgtcaatagaatatctttcataagcaacggcattaaatgtctacctgatggcttgatggaatgcccagagataacaactctacttttgcaagataattatccccttcaaaatattccccatgaactttttcttgcatttccagccctaagagttttgaatctgagtggaactggtattagagcactgcgttcttccatcaatagtttatgtcaattacgtgctctaatactacaaagttgcaaggagttgaaagagttaccacctattggtaatctttgcaatttgcaattgcttgattgcgatgatacaaggttacatcgtctgccgaaaggaatggacaagttgacagatctgaggcgtttaactgcaaattatttgaagagcatcgaccaaggaattcttctcaaattggcaagcattgaaatgatagatgtgctgggtacccgtcttgaatcgacttgttttgatgagctctcctctctacagaagctgacctctctttccatcaaattggatagctcatcagtttctaatagagaccacacctggatgtctagattgaaaagatttcgcattgtagttggggaaactaaattgcctatagatttcaacttttcaccaaggaatatagctatcttgaagtgtgaaattttcagtaagggagagctctcaggtatgttgcagtttgcttcaaatttgtgcttggaaaactgcaagggtctcaggaagttgattgcatacaacagttttaatggaataaaagaacttacagtaagtggctgttcttgtgatttcaaaccagcagaagaaggaagtggacggtttgaccctctgccaaatctggaacatctctgcctcttctggataaataatttagagagtgtatctgatatcagtcatcttctggatctaagattttctaaattacgcagactagatatttcccgttgtgcaagattaagatgtctctttaatgttggtggagctttttctgtaccgaatcacctggaacgtattgcaattagctattgtgatgagctggtagagttgtttgtgcaatgcggctccagtcagacgacacttgccaactcagaaattcctagagttcggaagttatggttaagagagttacgagaattaggaactctgggcgagccagagaatacgtgggaacacatgcaggaacttaagttgatagattgtaatcaaataaggaagcttcctctctctattcaaacttccaagaacatcaaagtaatagaaggacgatcagaatggtggaaccaattgaaatgggattccgacaacttcaagtcaaatttagagcattgtttccaaccagttcaatactgacaaaaggatcaaagttgaggctacttccactgcatttcaggtgatttaccgatacacttttagatttctcaattatgaaaatgtcagtggcactatacttgattattcgtccactagcatccttttatttagaactaataatttgggcattgattttgtcctatttctttttgttcgaaagtgttcataatgttcctagacttcttcatttatttcctgttagacgtcaaaactcatttacaagaaagatgaaaaggtagtctactggtgtagctttgagatatgtcccgattcaaacattttgtagcaaaagataaacctctccattcaactttgaacaaaaggcgttcccctttcatgtctcagttgaccttttaaaatgcatatttttaccctatggatcataaaccattttctcttcttttttttttttaaaaaaaactgctgtaagaaaaaggtagtcatgaaatggaagatatttacatttgaaatgtctcgaagtgatgatacaaaacgctgtaaatggttttaatacaattcctccattttcttttccttccctttcccctattaactcaagcgaattctttcattacctccctggactgatcacctttataaggtcttagatccactcttagctttacctcgggaaacttatacttaataaaaacagattaagggtgtgttttctaagataaaagtcattttccaaaaaatatttttcgaaaaatgacattttttgaatttttttatccgggtaaatgtatttcgttgttcggttggagagtccggtacctgctgaagtgaaatccgcttcaacattatcaacatgcacaaaagaaatggaaaaaattggatttgtcgactcgcctcaagatggaggggaagaaatatttctaaacggactgataatattgtctaagtgttatatgaagttcataattcaaatgttatcaagtatgttgagcttgactcattgttgcctcatgcaggagtgaattagaaaggcagaagaaggaacttcctgcactagaaaaacagagttttgagccaaagttaatcagtggagtttgttgtgatgcatttcatgtcttgtaatttttctgccaataattattccgtgtttgtactatttttcttctttctggttctgatattttgattgcttgactgtatactgagtaattttttgtttaagttatattgtgtagtacattcaaaaatttggcatgtgtccttgcttaggtacaattaagctaaagagccattgaggggaagaaaaactttttggataatcacttgaaaaatatattttacatatttacagagtcaataccctgcagattacatatacacaaaatgatcaagtgatgttagtcatt

SEQ ID NO: 122 - DNA, 1536 bp, Nicotiana tabacum
atgattgagattctaaaagatgcgtgcttactagaagcccatacgttgaactctgtgaagatgcatgacgtggttcgcgatgttgctatatggatagctaattcctttgggggtgagcacaattctcttattcaagctggaattgggttgagtgatatatcacatattaaaatgtctacttctgtcaatagaatatctttcataagcaacggcattaaatgtctacctgatggcttgatggaatgcccagagataacaactctacttttgcaagataattatccccttcaaaatattccccatgaactttttcttgcatttccagccctaagagttttgaatctgagtggaactggtattagagcactgcgttcttccatcaatagtttatgtcaattacgtgctctaatactacaaagttgcaaggagttgaaagagttaccacctattggtaatctttgcaatttgcaattgcttgattgcgatgatacaaggttacatcgtctgccgaaaggaatggacaagttgacagatctgaggcgtttaactgcaaattatttgaagagcatcgaccaaggaattcttctcaaattggcaagcattgaaatgatagatgtgctgggtacccgtcttgaatcgacttgttttgatgagctctcctctctacagaagctgacctctctttccatcaaattggatagctcatcagtttctaatagagaccacacctggatgtctagattgaaaagatttcgcattgtagttggggaaactaaattgcctatagatttcaacttttcaccaaggaatatagctatcttgaagtgtgaaattttcagtaagggagagctctcaggtatgttgcagtttgcttcaaatttgtgcttggaaaactgcaagggtctcaggaagttgattgcatacaacagttttaatggaataaaagaacttacagtaagtggctgttcttgtgatttcaaaccagcagaagaaggaagtggacggtttgaccctctgccaaatctggaacatctctgcctcttctggataaataatttagagagtgtatctgatatcagtcatcttctggatctaagattttctaaattacgcagactagatatttcccgttgtgcaagattaagatgtctctttaatgttggtggagctttttctgtaccgaatcacctggaacgtattgcaattagctattgtgatgagctggtagagttgtttgtgcaatgcggctccagtcagacgacacttgccaactcagaaattcctagagttcggaagttatggttaagagagttacgagaattaggaactctgggcgagccagagaatacgtgggaacacatgcaggaacttaagttgatagattgtaatcaaataaggaagcttcctctctctattcaaacttccaagaacatcaaagtaatagaaggacgatcagaatggtggaaccaattgaaatgggattccgacaacttcaagtcaaatttagagcattgtttccaaccagttcaatactga

SEQ ID NO: 123 - protein, 511 aa, Nicotiana tabacum
MIEILKDACLLEAHTLNSVKMHDVVRDVAIWIANSFGGEHNSLIQAGIGLSDISHIKMSTSVNRISFISNGIKCLPDGLMECPEITTLLLQDNYPLQNIPHELFLAFPALRVLNLSGTGIRALRSSINSLCQLRALILQSCKELKELPPIGNLCNLQLLDCDDTRLHRLPKGMDKLTDLRRLTANYLKSIDQGILLKLASIEMIDVLGTRLESTCFDELSSLQKLTSLSIKLDSSSVSNRDHTWMSRLKRFRIVVGETKLPIDFNFSPRNIAILKCEIFSKGELSGMLQFASNLCLENCKGLRKLIAYNSFNGIKELTVSGCSCDFKPAEEGSGRFDPLPNLEHLCLFWINNLESVSDISHLLDLRFSKLRRLDISRCARLRCLFNVGGAFSVPNHLERIAISYCDELVELFVQCGSSQTTLANSEIPRVRKLWLRELRELGTLGEPENTWEHMQELKLIDCNQIRKLPLSIQTSKNIKVIEGRSEWWNQLKWDSDNFKSNLEHCFQPVQY

SEQ ID NO: 124 - DNA, 5750 bp, Nicotiana tabacum
aagattgaagaggctccacaacaactatttaaaatgaggaaatacacagtttggcttcatttgatcatgtttgagagcatcattaattagcattctgatcagaaccattttttttttctttacctcaagaattgttcaatggatataatttttaatgttgtatctggctttgttgttaaggtgggaaagtttgggtctaaattcatatttcctaagattgtaaataccatccatttctcatcagatattgaaaatcttaggaaggaaatggagaagctaacaaagcttagagatgatatcaaagagaaagtggaaggagctaagagcgaaggctataaaccaaaaccagatattttcaaatggctccaagatgttcaaaagctagagaatgaatgggaattcatgcaagaaagcattgcggaagctaagatttttgcttataaatgttgtccaaaatggagccttcgctcggaaatcttcactcaagcactgaacaggcgagatgagctttgtgcgcttgtagaaatcggagaaaattttggatcaaatttggtggtagaaatttatacgatccaaaaagctgagttcatcccaggaccatcaatagaaggccagtcagcagcaacaagaaatctcaacaaaattttacaactattagaagataataaggtattgttcgaattaaagagttactttctgaaatttaagctaaatatagagtgcagttacttttccttttatttggtgaaattaatatttattgaaaaaaattcttttaatttacaccagaagtttttctctcatttgttcctcacatgtaccttttatctgttaaatattttatcatatagcgtatatattattgagaaagttttatcggttatatgagaatattttactaggtgaaaaaactaaaaatattatttagtgaaataaaatatttatcgagcaaatattatatttatatcgagaaagtttactgtcgttgggtcaaatgtgaagatcatgacaggtcaacaatgttattatacatataaaagaaaagagagtgcgagagaaaatgatgagaaacaagtttataagagatttaaaatgtagatatttctctcttttctattttaatgaattttcatcaaaggttttatatttatctttaatatataaaaataagaaaaatagtttatttataaaataaacaactaaattttaggatttcaaaatcagttaaaatatttttattaaatctttccctatttgacttatataggaatctaatatttaacatatttgaaattaatttaagatctaaaggtgaagttgttcatcggttttctttttcctttgaaagtaggcttattggataaaattataattatatttaaatattcaattttaggatgagctaatattaagaattttaatcaaaaaaataaattatttttttaatgttgagaatgaatagttataacgccgaattaactaattagtaaaagaatccaatccactaattttcaaatttaacatactcataaaatcatattttcaagttgacaaaactctatggtgcataaatttatttcggagcataggcggtgaaagaaataaaataatacaacaaaatcgattatggtataatattaaaattcaaattcattaaaatacaaaatcgaacaaaataaggataaaaagaatgcactcagaatgagttttcattaattatttttctttcttttttctattgattccaacaatgacttcttgtagttttgaaaatgttaagttatttcttgtaccataattactcaacattatttattttatattttacatttcataagtggtaatagaaattcttacacagaacaattcagaaaatagtatttgatatgccaaattttagttggatttaaagtcccaactgttaatgaaataattaaataacaattatttctgatataaaatttatttttaaaaggttaaagagtctatcaacattttgcatagaggctttctttacttttataatagaatacgcataggggttccacacttttataacagaaaatatacatgaacgagtgctagatatcgtttggttgattatatatgcagctccttaaatttgttagcatttttcattcagacacttgtacgtaatgagttttgttccaattgaacacttgaacaaattcacaagtgtgtctattgaacacttatttgacaattctagacaaatcacaagtgtgtctattgattttcatatctcgttaccattattttctaaagcaaatccctaagatctcaccggaaagtaaagaggggaagtaacccggcgtagagtggtggcggcagataagaagggaaaaagatagaaaattgagtactactattaaaaacgataaattgagtctttttactctctcaaaaagaggtgtgatacacatgtcagcagcatgtcttcaataggcgcacttgtgaacaagtttaggtagggttgggcgttcgggcagttcggattgagtatgaaaattacagtttagatattcggtttttcgattaaataagtgacaatccaaattcaattcaaataagctcggattggatcagaatttttaagttcgctttggatattttgaattttcacttttgagcctatatgtttagatatttcttcttcttacaaaaataaacaaataaaatattcatgttaaattatcttaaaagtttctcatcctcactgtaatcatccaaataaagtattcaagtaatgaaataattataaaggaaatacaacaaagacattaataatgccgataggaagtagtgagtggagattaagttgagatcaagagattatgagtgaattatcaaaacatacacctccttctttctctaatttgctaaatttcctctatataaccattgctgcatctttcactctgtggataaataattttttagggtatttgaatccttttaggtatgcaccattggtgtatggggtgttggaggagtcggcaaaacgactttggtgatgaatgtgaacaatgaactcctaaagattgctgcgtcgagctctcaactgtcttttgatgttgtgatatgggttacagtgcccaaaccgccaacggacgttagaaaggttcaagcacaaattgccaacagattaaaactacagacggatagcgaggaaagtgtagaaagcattgctagcagaattcatcaaaggctcaaggaaggaatgaagctccttcttatacttgatgatgtttgggaacctataaatttggatcatataggtgtgccacaacctgaagatcacccaagatgcaaggtaattataacatctcgatttttggatgtttgtaggcaaatgagaacagacgaggaaataaaggtgtacgcattggatgaggatgaatcttggcacatgtttgtcaaaaatgtgggagatattgcgaatctggagcatattcaaccattcgcaaaagaaattgcaatggagtgcgatggattacctttagcaatcactgtcattggagcatctatgagagggaaggagagggtcgagctatggaatgatgctttagaatcacttagaaagtccgaacctcgtaacaaagatgtaaaagataaggtttacaaggtcatcgagtggagttttgattctttagactctgaggatattcaaagttgtttcttgtattgctcgttatatccagaggctatttcaacagctgatctcatacattgttggtgggcagaggggctccttggtcatgaacatggcacatatgaagaagcctacaacaggggaatcatagcgattgagagtctaaaagatgcctgcttactagaagcccacgagtgggattctgtaaagatgcttgaactagcaacccataagttgaattctgtgaagatgcatgatgtggttcgtgatgttgctatatggatagctaattcctttcggggtgagcacgattctcttattcaagctggaattggattgactgatatatcacatattaaaatgaaagcttctgtcaagagaatatctttcgttagtaacaaaattgaatgtctacctgattgcttcttggaatgcccagagacaacaactttacttttgcaagataatattccgcttcggagaatttcccatgattattttttggcatttctagccttaagagctctgaatctgagtaacacttctattagagaactgcctatttccatcaacagtttatatcaactacgtgctctagtactacagaactgctgctacttgactgaattaccacctattggtaatcttcgcaatttgcaattgcttgattgtgataatacaaggttacatcgtctccctccaggaatggacaagttgacagatctgagggtattatatctgcctgcaactgatttggagaacattcgcgaaggaatccttctcagattgtctagcattgaaatgttaaatatgctagataccaaatacctttggggccgaagctacccaacgcttgacgagctctcatatctacgcaagctgacttgtctttttatcaaattggatagctcatcagtttcacatagagaccacacctggatgtctagattgaaaagatttcacattgaagttggcgaagcgccaatgccattcaacatttcaactaggatgataggtgtttccgagtgtgaaattttcattcggggacagctctcaggcatgttgcagtttgcttcacttttgtacttgaaaaattgcaacggtctcagcaagttgattgggtacaacaacaattttgatggattaaaatcattacacattagtggatgtcattgttatttcaaaccaatggaagaaggaaacgggcagtttgaccctctaccaaatctggagtctcttcgcctctataagatttttaatttaatgagtgtttctgattttggtcatcttctcggtctaagatttactaaattacgccaactggatgtgtatgcgtgtacaaatttaacatgtctttttataggtggtggggctttttctgtacctaaacacctggaagaaattgatatcatcttatgtccgaagcttgtagagttatttgagcaatgcgactctctcttcaactcagaatttgcaagagttcgaaagttaaggttgaaagagttaccgcaattagaaactctgggcaagccactgagtatgtgggaacacctggaggaacttagcttgataaactgcaatcaaataaggaaattacctctgtttattcaaacttccaagaacatcaaaataataagaggagcttcagaatggtggaaccaattggagtgggatgacaacagcttcaagtcagatttggagcattgtttcctaccacgttactactaattattacttgctgggtcggagcgtagacgagcgagcatagccaagcaaagagggaaccccgtcatagagcagtcaactagaagtagaagactgctggcctgagagagggcggccactactgacagaaggatcaaagttgaagttgcttccgttgcatttcaggtgatgcgccaattaacttttagatttctcaattgtaaaactgctagtggtactatactagtatattgtttgtcctatagcatccttttctatacaactaatttgagccttgattttttattttggtttataatggatttgggttgatgcccaaattattttacaacaaagatgaacacagagaggg

SEQ ID NO: 125 - DNA, 2952 bp, Nicotiana tabacum
atggatataatttttaatgttgtatctggctttgttgttaaggtgggaaagtttgggtctaaattcatatttcctaagattgtaaataccatccatttctcatcagatattgaaaatcttaggaaggaaatggagaagctaacaaagcttagagatgatatcaaagagaaagtggaaggagctaagagcgaaggctataaaccaaaaccagatattttcaaatggctccaagatgttcaaaagctagagaatgaatgggaattcatgcaagaaagcattgcggaagctaagatttttgcttataaatgttgtccaaaatggagccttcgctcggaaatcttcactcaagcactgaacaggcgagatgagctttgtgcgcttgtagaaatcggagaaaattttggatcaaatttggtggtagaaatttatacgatccaaaaagctgagttcatcccaggaccatcaatagaaggccagtcagcagcaacaagaaatctcaacaaaattttacaactattagaagataataaggtatgcaccattggtgtatggggtgttggaggagtcggcaaaacgactttggtgatgaatgtgaacaatgaactcctaaagattgctgcgtcgagctctcaactgtcttttgatgttgtgatatgggttacagtgcccaaaccgccaacggacgttagaaaggttcaagcacaaattgccaacagattaaaactacagacggatagcgaggaaagtgtagaaagcattgctagcagaattcatcaaaggctcaaggaaggaatgaagctccttcttatacttgatgatgtttgggaacctataaatttggatcatataggtgtgccacaacctgaagatcacccaagatgcaaggtaattataacatctcgatttttggatgtttgtaggcaaatgagaacagacgaggaaataaaggtgtacgcattggatgaggatgaatcttggcacatgtttgtcaaaaatgtgggagatattgcgaatctggagcatattcaaccattcgcaaaagaaattgcaatggagtgcgatggattacctttagcaatcactgtcattggagcatctatgagagggaaggagagggtcgagctatggaatgatgctttagaatcacttagaaagtccgaacctcgtaacaaagatgtaaaagataaggtttacaaggtcatcgagtggagttttgattctttagactctgaggatattcaaagttgtttcttgtattgctcgttatatccagaggctatttcaacagctgatctcatacattgttggtgggcagaggggctccttggtcatgaacatggcacatatgaagaagcctacaacaggggaatcatagcgattgagagtctaaaagatgcctgcttactagaagcccacgagtgggattctgtaaagatgcttgaactagcaacccataagttgaattctgtgaagatgcatgatgtggttcgtgatgttgctatatggatagctaattcctttcggggtgagcacgattctcttattcaagctggaattggattgactgatatatcacatattaaaatgaaagcttctgtcaagagaatatctttcgttagtaacaaaattgaatgtctacctgattgcttcttggaatgcccagagacaacaactttacttttgcaagataatattccgcttcggagaatttcccatgattattttttggcatttctagccttaagagctctgaatctgagtaacacttctattagagaactgcctatttccatcaacagtttatatcaactacgtgctctagtactacagaactgctgctacttgactgaattaccacctattggtaatcttcgcaatttgcaattgcttgattgtgataatacaaggttacatcgtctccctccaggaatggacaagttgacagatctgagggtattatatctgcctgcaactgatttggagaacattcgcgaaggaatccttctcagattgtctagcattgaaatgttaaatatgctagataccaaatacctttggggccgaagctacccaacgcttgacgagctctcatatctacgcaagctgacttgtctttttatcaaattggatagctcatcagtttcacatagagaccacacctggatgtctagattgaaaagatttcacattgaagttggcgaagcgccaatgccattcaacatttcaactaggatgataggtgtttccgagtgtgaaattttcattcggggacagctctcaggcatgttgcagtttgcttcacttttgtacttgaaaaattgcaacggtctcagcaagttgattgggtacaacaacaattttgatggattaaaatcattacacattagtggatgtcattgttatttcaaaccaatggaagaaggaaacgggcagtttgaccctctaccaaatctggagtctcttcgcctctataagatttttaatttaatgagtgtttctgattttggtcatcttctcggtctaagatttactaaattacgccaactggatgtgtatgcgtgtacaaatttaacatgtctttttataggtggtggggctttttctgtacctaaacacctggaagaaattgatatcatcttatgtccgaagcttgtagagttatttgagcaatgcgactctctcttcaactcagaatttgcaagagttcgaaagttaaggttgaaagagttaccgcaattagaaactctgggcaagccactgagtatgtgggaacacctggaggaacttagcttgataaactgcaatcaaataaggaaattacctctgtttattcaaacttccaagaacatcaaaataataagaggagcttcagaatggtggaaccaattggagtgggatgacaacagcttcaagtcagatttggagcattgtttcctaccacgttactactaa

SEQ ID NO: 126 - protein, 983 aa, Nicotiana tabacum
MDIIFNVVSGFVVKVGKFGSKFIFPKIVNTIHFSSDIENLRKEMEKLTKLRDDIKEKVEGAKSEGYKPKPDIFKWLQDVQKLENEWEFMQESIAEAKIFAYKCCPKWSLRSEIFTQALNRRDELCALVEIGENFGSNLVVEIYTIQKAEFIPGPSIEGQSAATRNLNKILQLLEDNKVCTIGVWGVGGVGKTTLVMNVNNELLKIAASSSQLSFDVVIWVTVPKPPTDVRKVQAQIANRLKLQTDSEESVESIASRIHQRLKEGMKLLLILDDVWEPINLDHIGVPQPEDHPRCKVIITSRFLDVCRQMRTDEEIKVYALDEDESWHMFVKNVGDIANLEHIQPFAKEIAMECDGLPLAITVIGASMRGKERVELWNDALESLRKSEPRNKDVKDKVYKVIEWSFDSLDSEDIQSCFLYCSLYPEAISTADLIHCWWAEGLLGHEHGTYEEAYNRGIIAIESLKDACLLEAHEWDSVKMLELATHKLNSVKMHDVVRDVAIWIANSFRGEHDSLIQAGIGLTDISHIKMKASVKRISFVSNKIECLPDCFLECPETTTLLLQDNIPLRRISHDYFLAFLALRALNLSNTSIRELPISINSLYQLRALVLQNCCYLTELPPIGNLRNLQLLDCDNTRLHRLPPGMDKLTDLRVLYLPATDLENIREGILLRLSSIEMLNMLDTKYLWGRSYPTLDELSYLRKLTCLFIKLDSSSVSHRDHTWMSRLKRFHIEVGEAPMPFNISTRMIGVSECEIFIRGQLSGMLQFASLLYLKNCNGLSKLIGYNNNFDGLKSLHISGCHCYFKPMEEGNGQFDPLPNLESLRLYKIFNLMSVSDFGHLLGLRFTKLRQLDVYACTNLTCLFIGGGAFSVPKHLEEIDIILCPKLVELFEQCDSLFNSEFARVRKLRLKELPQLETLGKPLSMWEHLEELSLINCNQIRKLPLFIQTSKNIKIIRGASEWWNQLEWDDNSFKSDLEHCFLPRYY

SEQ ID NO: 127 - DNA, 3908 bp, Nicotiana tabacum
atagaagtcgaggacctagcgtcacagggaaaaagaaaagtcgaggaccaataatgcacctagtgtccttttgaacaaccaaattcttgacattaatatatggccacaagttgcccctccaatagttgattttgctttttgttcttcttctcgatcggatttctgccttaagcaaagaagaaacagttagtttagtttagtctcaggaattgttcaatggaaataatttttaatgctgtaggtggttttgttgttgaggcggggaagttggtgtgtaaatgcatctatcctaatattgaaaataccgtctgtttcacatcaaatgttcaaagtgtaagagaggaaatggagaagctaacaaagtttagagatgatatcaaagggagggtggaaggagctgagggagaaggctataaaacaaaaccagaggttctccagtgggtcgaagatgttcaaaagctggagactgactgggaatctatgcaagaaaacattgcagcggctaagatggttgcatataaatgttgtccaaattgcagtcttcgcttggaagtctccactcaagcacgaatcatgcgagatcaactttccgaccataaaaaaatgggagaatattttgggtccagtttggtggtagaaaattaccaggtgaaaaaagtggagttcatcccaggaccatcaatagaaggccagtcaacagcaacaagaaatctcaacgaaatcctacgactattagaagatgaaaaggtatgttgaacttaaatcaattttctgttctagtgttgctaaaattcttctttataaccaattttccatccatgacttgtgggtaaatttctttttgggtaatttgaatcctttcaggtatgcatcattggtgtatggggaatgggaggagtcggcaaaacgactttggtgaagaatctgaacaatgagctcctaaaaactgctgcgtcaagagctaaactgtctttttgtgttgtgatatgggttacagtgcccaaaccaccaatagacataagaaaggttcaagcacaaattgccaacagattaaacctaaaggtggacagtgaggaaagcgaagaacgcattgccggcataattcatcagaggctcaaggaagaaaagagtttccttcttatactcgatgatgtttggcaaactataaaattggatcatgtaggcgtgcccaaacctgaagatcccgcaagaagcaaggtaattttaacttctcgttttgttgatgtttgtaggcaaatgaaaacagacaccgaaatgaaggtgttgacatttgatgaagatgaatcttggcaaatgtttgtcaaaaatgcgggagatattgccaatctggagcatattcaaccagttgcaaaggaaattgcaaaggagtgcgatggattacctttagcaatcactgtcatcggagcatctatgagaggcaagaagagggtcgagctttggaaagatgctttgaaatcacttagaatgtctgaacctcacaacactgatgtaaaagataatgtttacaaggtcatcaagtggagttttgattctttagaatctcaggatattgatattgatattgaattatccttagagcaaagaagcaaacatgtgaaaaaaaggggaggtgacattcaaagttgtttcttgtattgctccttatatccagcggttatttcaccagatgatctcatacattgttggtgggcagaggggttccttggtgaacatgacacatatgaagaagcctacaataggggaatcacaatgattgagagtctaaaagatgtctgcttactagaagccaatgagtgggatgtaaagatgcatgatgtggttcgtgatgttgctatatggatagctaattccttgggggatgagcacaattcacttattcaagctggacttgggttgtctgagatatcacatattaaaatgtcagcttctgtcaagagaatatcttttgtaagcaacaaaattgaacgtctacctgattccttcaagaaatgcccagagacaacatctttacttttgcaggacaatcatcgccttgtggaaattcccgatgcattctttttggcatttccagccctaagagttttgaatctgagtagaactgatattagagcactgccttcttccatcaatagtttatatcaattacgtgctctaatactacaaagttgcaacgagttgaaagagttaccacctattggtaatctttgcaatttgcaattgcttggttgtgataatacaaggttacatcgtctgccgcaaggaatggacaagttgacagatctgaggcgtttaactgcaaattatttggagagcatcgaccaaggaattcttctcaaattggctagcatggaaatgataaatgtgccgggtacccctcttgaatcaacttgttttgatgagctctcctctctacagaagctgacttctctttgcatcagattggatagctcatcagtttctaatagagaccacacctggatgtctagattgaaaagatttcaaattgtagttggggaagttcgaatgtctataaacttcaacaattcaccaaggaatatagctatctccgagtgtgaaattttcagtaagggagagctctcaggcatgttgcagtttgcttcaaatttgcgcttggaaaactgcaggggtctcaggaagttgattgcatacaacagttttaatggaataaaagaacttacagtaagtcgctgttattgtgatttcaaaccagcaggaggaggaagtggacggtttgaccctctgccaaatctggaacatctctgcctcatctggatacataatttagagagtttatctgatatcagtcatcttctgggtctaagattttctaaattacgcagtctagatattttcggttgtccaagattgagatgtctctttaacgttggtggagctttttttgtaccgaatcagctggaacatattgaaattgagtattgtgatgagctggtagagttgtttgtgcaatgcggctcaagtcagacgacacttgccaactcagaaattccaagagttcggaagttactgttgagaaatggtccaagcttgagaacactgggcgagccagagaatacgtgggaactcctggaggagcttcgtttgacaaaatgcagtcaaataaggaagttgcctctctctattcaaaccaacatcaaagtaataagaggagcatcagaatggtggaaccaattggaatgggattccgacaacttcaagtcaaatttagagcattgtttccaaccatattgttgaagtttggcaaaatgccaaagtcccacattggttgggagttaagtttggggaggatttttcccctataaaagaaggtctaatgtttaggattgaaacacacctctcatttgccttctcatctgtttaagacaatttgtattcttctctcttagtatttatttactgtatttttggaatgtgaaataaaatattggtttgtgtccgagagtaggcaaaattagccgaaccacgtaaattctggtgttcctttattgttgctttattgtcttatttattattttgtgctgtcataatttttggtatgtagtttgacttatcacactatatacatttggcttccgcaacacattggtatcagaagccaaggtactgtctaagtatgctcttggttgcagcatagctgatcttccacatcagaaaaagattatctggtaactgagtcaagttctgtctgagtatgctctgtggttgcagcttagtctgatcttccacaccaaaaggaaaaataatcttgatttgtgtcgtcagctattaaataattattgtgtcaaagatggagacaataaacaagaagaatctacatcaatgtcaacaatacgtcatcattgcatctt

SEQ ID NO: 128 - DNA, 2961 bp, Nicotiana tabacum
atggaaataatttttaatgctgtaggtggttttgttgttgaggcggggaagttggtgtgtaaatgcatctatcctaatattgaaaataccgtctgtttcacatcaaatgttcaaagtgtaagagaggaaatggagaagctaacaaagtttagagatgatatcaaagggagggtggaaggagctgagggagaaggctataaaacaaaaccagaggttctccagtgggtcgaagatgttcaaaagctggagactgactgggaatctatgcaagaaaacattgcagcggctaagatggttgcatataaatgttgtccaaattgcagtcttcgcttggaagtctccactcaagcacgaatcatgcgagatcaactttccgaccataaaaaaatgggagaatattttgggtccagtttggtggtagaaaattaccaggtgaaaaaagtggagttcatcccaggaccatcaatagaaggccagtcaacagcaacaagaaatctcaacgaaatcctacgactattagaagatgaaaaggtatgcatcattggtgtatggggaatgggaggagtcggcaaaacgactttggtgaagaatctgaacaatgagctcctaaaaactgctgcgtcaagagctaaactgtctttttgtgttgtgatatgggttacagtgcccaaaccaccaatagacataagaaaggttcaagcacaaattgccaacagattaaacctaaaggtggacagtgaggaaagcgaagaacgcattgccggcataattcatcagaggctcaaggaagaaaagagtttccttcttatactcgatgatgtttggcaaactataaaattggatcatgtaggcgtgcccaaacctgaagatcccgcaagaagcaaggtaattttaacttctcgttttgttgatgtttgtaggcaaatgaaaacagacaccgaaatgaaggtgttgacatttgatgaagatgaatcttggcaaatgtttgtcaaaaatgcgggagatattgccaatctggagcatattcaaccagttgcaaaggaaattgcaaaggagtgcgatggattacctttagcaatcactgtcatcggagcatctatgagaggcaagaagagggtcgagctttggaaagatgctttgaaatcacttagaatgtctgaacctcacaacactgatgtaaaagataatgtttacaaggtcatcaagtggagttttgattctttagaatctcaggatattgatattgatattgaattatccttagagcaaagaagcaaacatgtgaaaaaaaggggaggtgacattcaaagttgtttcttgtattgctccttatatccagcggttatttcaccagatgatctcatacattgttggtgggcagaggggttccttggtgaacatgacacatatgaagaagcctacaataggggaatcacaatgattgagagtctaaaagatgtctgcttactagaagccaatgagtgggatgtaaagatgcatgatgtggttcgtgatgttgctatatggatagctaattccttgggggatgagcacaattcacttattcaagctggacttgggttgtctgagatatcacatattaaaatgtcagcttctgtcaagagaatatcttttgtaagcaacaaaattgaacgtctacctgattccttcaagaaatgcccagagacaacatctttacttttgcaggacaatcatcgccttgtggaaattcccgatgcattctttttggcatttccagccctaagagttttgaatctgagtagaactgatattagagcactgccttcttccatcaatagtttatatcaattacgtgctctaatactacaaagttgcaacgagttgaaagagttaccacctattggtaatctttgcaatttgcaattgcttggttgtgataatacaaggttacatcgtctgccgcaaggaatggacaagttgacagatctgaggcgtttaactgcaaattatttggagagcatcgaccaaggaattcttctcaaattggctagcatggaaatgataaatgtgccgggtacccctcttgaatcaacttgttttgatgagctctcctctctacagaagctgacttctctttgcatcagattggatagctcatcagtttctaatagagaccacacctggatgtctagattgaaaagatttcaaattgtagttggggaagttcgaatgtctataaacttcaacaattcaccaaggaatatagctatctccgagtgtgaaattttcagtaagggagagctctcaggcatgttgcagtttgcttcaaatttgcgcttggaaaactgcaggggtctcaggaagttgattgcatacaacagttttaatggaataaaagaacttacagtaagtcgctgttattgtgatttcaaaccagcaggaggaggaagtggacggtttgaccctctgccaaatctggaacatctctgcctcatctggatacataatttagagagtttatctgatatcagtcatcttctgggtctaagattttctaaattacgcagtctagatattttcggttgtccaagattgagatgtctctttaacgttggtggagctttttttgtaccgaatcagctggaacatattgaaattgagtattgtgatgagctggtagagttgtttgtgcaatgcggctcaagtcagacgacacttgccaactcagaaattccaagagttcggaagttactgttgagaaatggtccaagcttgagaacactgggcgagccagagaatacgtgggaactcctggaggagcttcgtttgacaaaatgcagtcaaataaggaagttgcctctctctattcaaaccaacatcaaagtaataagaggagcatcagaatggtggaaccaattggaatgggattccgacaacttcaagtcaaatttagagcattgtttccaaccatattgttga

SEQ ID NO: 129 - protein, 986 aa, Nicotiana tabacum
MEIIFNAVGGFVVEAGKLVCKCIYPNIENTVCFTSNVQSVREEMEKLTKFRDDIKGRVEGAEGEGYKTKPEVLQWVEDVQKLETDWESMQENIAAAKMVAYKCCPNCSLRLEVSTQARIMRDQLSDHKKMGEYFGSSLVVENYQVKKVEFIPGPSIEGQSTATRNLNEILRLLEDEKVCIIGVWGMGGVGKTTLVKNLNNELLKTAASRAKLSFCVVIWVTVPKPPIDIRKVQAQIANRLNLKVDSEESEERIAGIIHQRLKEEKSFLLILDDVWQTIKLDHVGVPKPEDPARSKVILTSRFVDVCRQMKTDTEMKVLTFDEDESWQMFVKNAGDIANLEHIQPVAKEIAKECDGLPLAITVIGASMRGKKRVELWKDALKSLRMSEPHNTDVKDNVYKVIKWSFDSLESQDIDIDIELSLEQRSKHVKKRGGDIQSCFLYCSLYPAVISPDDLIHCWWAEGFLGEHDTYEEAYNRGITMIESLKDVCLLEANEWDVKMHDVVRDVAIWIANSLGDEHNSLIQAGLGLSEISHIKMSASVKRISFVSNKIERLPDSFKKCPETTSLLLQDNHRLVEIPDAFFLAFPALRVLNLSRTDIRALPSSINSLYQLRALILQSCNELKELPPIGNLCNLQLLGCDNTRLHRLPQGMDKLTDLRRLTANYLESIDQGILLKLASMEMINVPGTPLESTCFDELSSLQKLTSLCIRLDSSSVSNRDHTWMSRLKRFQIVVGEVRMSINFNNSPRNIAISECEIFSKGELSGMLQFASNLRLENCRGLRKLIAYNSFNGIKELTVSRCYCDFKPAGGGSGRFDPLPNLEHLCLIWIHNLESLSDISHLLGLRFSKLRSLDIFGCPRLRCLFNVGGAFFVPNQLEHIEIEYCDELVELFVQCGSSQTTLANSEIPRVRKLLLRNGPSLRTLGEPENTWELLEELRLTKCSQIRKLPLSIQTNIKVIRGASEWWNQLEWDSDNFKSNLEHCFQPYC

SEQ ID NO: 130 - DNA, 4175 bp, Nicotiana tabacum
atcactcttcaaagttctctcttttttctctcctctttgaaaaagttgaaatctttttaagtttattttcaagaatattattgaagatacaagatgttggaaaatcaagatttgggattgagtttgagtcttagttttccagaaaacaaaacaacaaattcattgcagctgaatttgttctcttctttggcttcttcaacttctccttctccttctccttcaccttttaatctacttcagaaaacttgttggactgactcctttccttcttcaggtttgtgatattttcttcttgatttatcatttctttctgtataaactacagatccttcgggacggcccagttagtttggaggggttatccatagtgatgacgtgagatcgatcaccctcaatgctttacgggtctgagcctgtcacaccggatttgtctagtgcgcctgtgtgatttgcaggctattacacaatagtaatttacccgatgcccacaaaatgctcacgcagaggctgtggtagaggcgtagaggcgtagcggctgcaaattttactcggttacaaaatacaatctcattatattttgctcagtttctacttttttccttgacccttttggatattccaaaaaaactaaagcatttatctttctcccctcttcaatatacccaaaagttgaaggaaaaagtggcattttttggtatagattttcattgttgatctgaaaacagaggcttgatctggaactttatttttctcttaaagtttttaatatgtagttttatactttaactttgctatctgatcacttattacaaaactacagtaattatctctaaaaaaaagaataattggtaataaaatttttgaataaaccagattatctggtacagattaaaaaaatgcagagcctgtaaaacattttaaactgtcaaccgtggtgccacacagaggcggacccaaaattcaaatgtgcctggggacataagcagaccactcaactagccctattaaacttttgatattaagagttccaggctaaatatataaatattttcaatatatatgcgcatatatatattcagaatttttgccgaagttaacggtgtcaacttctccgtacataggtccacctctagtggagtatatatatatatatatattaaactacaatgagtttagtggtaaagacatagaagacctaaacttatcaaatttaaattatgaatctgccggacttttatttataaattgaatttttaacataaatattttttttcagatcggaacttggagacatgcagaacttttttaaagggaatagatgtgaacagaattccaacaattacagatacagaagaagaagaagctggagtttcttctccaaatagtactatttcaagtttgagtggaaataagagaaatgaaagagaaataaattgtgaggaagaattggattgttgtagaggtattagtgatgaagaagatggagaaacttgtagaaaaaaactaagacttactaaagatcaatctgctgttcttgaagagagttttaaagaacacaacactctcaaccctgtaagttttcttctaccaagttcacaatttatgtaggatttactatgtgtttggctatgttgctcggactctcctaagatgttgccggaattttgttggatcctctaaaaatagtgtatttttttggaggatctgacatgggtgtagcggtattttggagagttcgtgcaacttaagtatttggtacgacgaaagttatttttctgaaaatattttccggtgagaaatttttagcttcccatatttggttggagagtgaaattttttttctataaaaaatatttactaaattattgataataatattagcaaatagaatagaggtttgataaaataaaatttgggtgttaaagatcgataatagtatcgaaaattgaccctattacattgatgttgctattgcttgttactttatttttactactgcttgaaccgaggtttattagaaacaagttctctacctttataaggtaggagtaaggtctctctatacactaccctcccacaccctgcctatgagattaaactggggtttttgttgttgttattgttgtaatattatcgaaaattggttaaaatagtaatatgaagttaatagtcaatgatattagtgagacttcaggtctgcatacacactatgtaccctcctcaaaccccacttacaggattaaactaggtttactcttattattgtaataatatcgaaaattggttaaaatagtaatatgaagttaatagtcattgataatagtgaagaaaataattttcgaccaagactaaaggaaaaaacaaattattttttagaaaaatattttttcgaaaaagtattttgtatcatatcaaacattcctttagagttaattagttaagattttatgtatacatttaaaatttattttcatatgtatatgaattcgattttaacaataaattcagttgaacccacaaaattcgcttgcgctattattacattaggtaaataattaggtgttagtgtgtgttttggtctattaggagatttttgcttaaacagattagcttattatttttgtgatattttttttttacagaagcaaaagcaagctttggcaaagagactaggattaaggcctaggcaagtggaagtttggtttcaaaacagaagggcaaggtgagatttttgtttacttttatggttttttttgggattttactgcacatctttaagaatagtgaatataatgctgttgaaaatgatatgtaataataattaccaaaaattgaaaagtatatcatatgtcaaaatcaaatcatattgacattttgggatatactgcatttctttctcttgaaataataattgatgatattgacaatgatatatcaataataataccaaaaaattcaacagtatatcatatgtgaaagaatttaacttatatactttgatattttaaagaaattttagggtttttctatttttagctcatgtcagaaactatttacatttggtagccgacaaagtgtataaaatttgtataatttttatatataacatacaaaagtgtatatatatacacagaggcggatccaaaatttgaaggtcgggggtgcacttttggatgcaaccaaaatctgctttgtatatagggtgcccactattaatatatcactattttctaaatacatatacatttatacatggagtttatgccgaataacggtgccgatgacccctctcgatatagcataggtatgcctcttgtatatacaaaaagtatacaaaaaatatatattattttggttattattttgagagcaactatacaatgtaattttcctgatttttttataccaattaactagtgctatttaatccattgtagcaagttatttaaccttttctgtttcctacttccatttataacggagaacttttagacgatctgataatgtaaagattttttacgttattacgtacttatttattcaatgaatattttgggattttaactaatgggtcaagcatttttttttttgtgaacaggacaaaattgaagcaaacagaagtagactgtgagttcttgaagaggtgttgtgaaaatctaactgaagaaaatcggagattacaaaaggaagttcaagagttaaggacactaaagctatcacctcaattctacatgcaaatgacccctcccactaccctcaccatgtgcccttcatgtgagcaagtcgcgggcccaccaactccatccccgccagggcccacaaatgtcgaccctcgagcccaccaaatgggcctggcccaacaacaacggcccatgccgtttaatctttgggccacctctcccgtcccgcataggcccatcagcgccctaaaccctagatcgtgattttgccatcgacggaagggtaatttggtcatttgagttggtatactaatcttggaaaattcaacaacatgatgtgtatgtatgaaaataggtctaagatatggttgttttgatatggaggatttggtgggtctcaaaatttcttggttttattttggaccaatctttttcttcgtattaaccagctagtgtagtcattttactcttttagtaatagtagtttcttcttac

SEQ ID NO: 131 - DNA, 903 bp, Nicotiana tabacum
atgttggaaaatcaagatttgggattgagtttgagtcttagttttccagaaaacaaaacaacaaattcattgcagctgaatttgttctcttctttggcttcttcaacttctccttctccttctccttcaccttttaatctacttcagaaaacttgttggactgactcctttccttcttcagatcggaacttggagacatgcagaacttttttaaagggaatagatgtgaacagaattccaacaattacagatacagaagaagaagaagctggagtttcttctccaaatagtactatttcaagtttgagtggaaataagagaaatgaaagagaaataaattgtgaggaagaattggattgttgtagaggtattagtgatgaagaagatggagaaacttgtagaaaaaaactaagacttactaaagatcaatctgctgttcttgaagagagttttaaagaacacaacactctcaaccctaagcaaaagcaagctttggcaaagagactaggattaaggcctaggcaagtggaagtttggtttcaaaacagaagggcaaggacaaaattgaagcaaacagaagtagactgtgagttcttgaagaggtgttgtgaaaatctaactgaagaaaatcggagattacaaaaggaagttcaagagttaaggacactaaagctatcacctcaattctacatgcaaatgacccctcccactaccctcaccatgtgcccttcatgtgagcaagtcgcgggcccaccaactccatccccgccagggcccacaaatgtcgaccctcgagcccaccaaatgggcctggcccaacaacaacggcccatgccgtttaatctttgggccacctctcccgtcccgcataggcccatcagcgccctaaaccctagatcgtga

SEQ ID NO: 132 - protein, 300 aa, Nicotiana tabacum
MLENQDLGLSLSLSFPENKTTNSLQLNLFSSLASSTSPSPSPSPFNLLQKTCWTDSFPSSDRNLETCRTFLKGIDVNRIPTITDTEEEEAGVSSPNSTISSLSGNKRNEREINCEEELDCCRGISDEEDGETCRKKLRLTKDQSAVLEESFKEHNTLNPKQKQALAKRLGLRPRQVEVWFQNRRARTKLKQTEVDCEFLKRCCENLTEENRRLQKEVQELRTLKLSPQFYMQMTPPTTLTMCPSCEQVAGPPTPSPPGPTNVDPRAHQMGLAQQQRPMPFNLWATSPVPHRPISALNPRS

SEQ ID NO: 133 - DNA, 4175 bp, Nicotiana tabacum; identical to SEQ ID NO: 130

SEQ ID NO: 134 - DNA, 903 bp, Nicotiana tabacum; identical to SEQ ID NO: 131

SEQ ID NO: 135 - protein, 300 aa, Nicotiana tabacum; identical to SEQ ID NO: 132

SEQ ID NO: 136 - DNA, 4539 bp, Nicotiana tabacum
agctgattagggtttaagtgagaagctgattagggctcgaattccgtccacaaggcagtggctaccctgttggagctctcgcacttgccctatacatccctgatcgccattgatttgaaccttcaggtttgacaaatttgactacaacatttagctgtccaagttttttttgtcgaaatgttgatttttgggtattgtttcttttcctattatgcaaatgttggaggtcttatgcgtaccaatttctcttcaatcttacattttttttgcaaagatttcataaactttgaaacgaactaggtttttcaaaaaaataaaaaatcattctttgccaggattgtgtcaaactaacgcacctaagcttggtgaatttaagatggtcttaccgttagctaactccccacctatgttgctcggactctggtgtgggtatccaataggggtgcggatctaggaggtcggattcttcgtcacataaattttaggatccggaggtatggacccgaatgcggatgcgggtactgggatgcagcaaataaatgtatattataacatataaagtacatattttgattaattaaagctactacactaaaactaataaaatttaattccttataaacacctagtaatatgttatccataagatatctcgtgtaatagctaagcattctcatactttatataactaaacttatatgacataaacctaaaaatcaaactaaatggccaatcaatctatacttctcagtcattgatgtagtcagtgcaagaccaaatccagtgtggatctcacacccacaaatatgtcgtgtcgacacgggtgtgccagggattttgaagagtccgcacaacatagctcccaaccccttttcttgagtttgtgtccacaaaatgttcaaagatataggattttaggcttcttgaagttgactggttactttttcttgggtttagaaagagagtttgagttttgaaattgtagcatattcttctggtgaggaaaaaagatagactttttaatgctatataagttacaaagtttgattcccatcgtgaaaggaagaaaaatcagttatcttagttgttagatctgatggatatcgtcttggggagtggtcaatacagaggcgggtgtagtgctttagttacaggttcatccgaagccaataacttttgctcaggctctttatatgtattaaaaaaaattcaccatgtaagtataaataatagaatgctgaagtctatttgtttggactttatctgcctttaaggaagctaaacttatagaaatttagcaagattttgattgttctggtttatcagaaagatattctttgagacacaggtgacttcttcccatctgcctaaacgttggccggcaaagttacccgatggaatagtcgaggtgtgagcaagttggccggacaccaccgtcaccagaaaaaaaaagatggatatgttctttctaccacatatattgaggtttcaagggtctatggaattatgcactcatactgttccttttctttttggtgataagtacagtcagactgttcctcttgaattgttttttggaactctttctgttttaaaggtttttttgagacagccagagagaatagcagttataagttttggtagtttgataaaaatttagtcacaaatataggtttcatattagagactaatttctagcatgaagggttttagtttggtgcttaaaattgattagataattctatttgcacttaaaggtgggatatatttccttgttcttcggagttttagcgccatgctttaattgaatagacattcttattgtgatggtaatatgggagccgaaacagtttttcgtttttacagatgttagatttaatattttgttttggtgttagtgtctgaaataaaattgactcttctgtgcaacttgatacttaaaatcagaaactctgaaattgaggacttcggtcttgaagtaagtagtttattgagtgttactttttactttcaagtgaattggatagtacgaaacaaaactaaaccaaaatttaagtattttaagtgggttatggtaatctcatcagggggtagcagtatgctcggtctcctaaccatgctttttctctctttctccttctgcagagaaatcggttttggtgcattgcaagaagcgtatgctcatgaagttggagaagaaatccaagaaatgaaaaaagagtgctagcaccactggtttaggggtgacaaagggtgatgttaaagctgttgagcgtgatttaattttcaacgaagagaagctctcttttgtagggaccaggagagaaagggataaggaaaagatgggaactaaagcacccggagaaagcaaagatcgtgacatcaagagaaagaaagaaagaggtggtggaaaacagcctgggaagtccagtatagacaggtgcgaggatgctgttgaaaatattgtgaagaagaaaaatacattcaagaatgagcgggagaaaatgcatgatgcacttgtagataccaaaacaattgctcataaaagtgatagtgagacacagcatagtgaggtgaagaggaagagaaggaaggaaaagaggaaaaaagaggatggacaggtagatattgtgactggagtcaatcaaggcgatgtttcaaccatagtagagatagaagataacaaaacagatgatgctaatatcagaaagaggaaaaagaaaaaattaggaaacaattttaaagatctttcacatgaaaggagtgaaaaaagagtgagattttcaggcgatgttcgggttttccctccatccgttgatccaagtgatgagaagcatgaaattaacgaagaaaaattactgcacggcaaatggttcacaaaagaagaagatgaaattgtcaaagacgctgtttataaatacatcgaggtacataacttgggcaaagaaggattgcaaaaggttttgaactctatatctcatcctgaagtaaggggctgctggaaaaaaatagggagtgctataccgtacaggccttatggtgcagtttatcagcgtgcacaacgtttatttcgaagtggtgagaagcgtaaatatactgaagaagagtatgagatgatgcgaaagtaccatggagaacatggaaccaagtggaaggtcttggccgatgaacttgggaaacattggattcatgtgggaaatgcatggaataggataaaactggccaatcagaagaaaggaatttgggctcaggaggaaatccagactttgtttgatttggtaaacgctgatctgctactgaaactctgtgaagagaagaaatctaagcgtgggatgttacgggataatattagctggagtaaaattagtgacaaattgtccaccaggagtggtgtacgttgctgcaataaatggtacagacaattaacatcatcgatggtggccgcatgtgaatgggcagacactgatgactatcgcctaattgatgccctttttgaactggatccgagctgcatagaggatgtggattgggacaatcttcttgaccacagggatggagagttatgtcgaaagagatggaaacagatggttcgtcaaataagtcaacatgaaaacaagtcatttgctgcacaggtagaagtgttagctaagagataccgtcctgatttggttggagcaagagaggcctgggatagaaaaccacttgttccatgaagtgtcagcacagacgtttctatagagagagatgctcaaggaacatgtattctgaggcggatccaggtttttaaatcggttggtgggtatcctgtaccctttattttccagttagtttgaacatagcgtcactatataattttaaaaattattcaactgtatataggtcaaatcgaaggcattgagtgcagacaatacgtacactaaatacgtcactggatgtactaaatacatcctactcctatattcgaatgcatcttcatcaacttgagtgttacttatggcatatttggaatatatacttatcttattttaagacttaggagtctggtggggaaaaataagtagctgttgctttagactgagttttagataagaagactccaaaaagactcatctagtgcaaaagggggctatatatgtgtgtgtccaggaaatatcgtaataactgcctttgtttgtttcatttttaatacaggaaatatatctggttatttgccatggcatgatgcaaagaatcataatgttgctaagtggaaggaaggggcaggatcgtatcgctaccaaacgctgatctcacaatgtcaatccaaaagcctgaagaccatttcattccctgtacgtaaagttggtgatgaaacgcaatgttgataaatccatcaagtaaaatattcaatctcgtaattctagttatggtaggaactgtagttttaattactaggttttctcctgtatgttaaagaggccggttgtgtctgccaacgctaactgttatgaacgtggagtagggcattttctcgttactgttccaatgttcagatgaagg

SEQ ID NO: 137 - DNA, 1371 bp, Nicotiana tabacum
atgggaactaaagcacccggagaaagcaaagatcgtgacatcaagagaaagaaagaaagaggtggtggaaaacagcctgggaagtccagtatagacaggtgcgaggatgctgttgaaaatattgtgaagaagaaaaatacattcaagaatgagcgggagaaaatgcatgatgcacttgtagataccaaaacaattgctcataaaagtgatagtgagacacagcatagtgaggtgaagaggaagagaaggaaggaaaagaggaaaaaagaggatggacaggtagatattgtgactggagtcaatcaaggcgatgtttcaaccatagtagagatagaagataacaaaacagatgatgctaatatcagaaagaggaaaaagaaaaaattaggaaacaattttaaagatctttcacatgaaaggagtgaaaaaagagtgagattttcaggcgatgttcgggttttccctccatccgttgatccaagtgatgagaagcatgaaattaacgaagaaaaattactgcacggcaaatggttcacaaaagaagaagatgaaattgtcaaagacgctgtttataaatacatcgaggtacataacttgggcaaagaaggattgcaaaaggttttgaactctatatctcatcctgaagtaaggggctgctggaaaaaaatagggagtgctataccgtacaggccttatggtgcagtttatcagcgtgcacaacgtttatttcgaagtggtgagaagcgtaaatatactgaagaagagtatgagatgatgcgaaagtaccatggagaacatggaaccaagtggaaggtcttggccgatgaacttgggaaacattggattcatgtgggaaatgcatggaataggataaaactggccaatcagaagaaaggaatttgggctcaggaggaaatccagactttgtttgatttggtaaacgctgatctgctactgaaactctgtgaagagaagaaatctaagcgtgggatgttacgggataatattagctggagtaaaattagtgacaaattgtccaccaggagtggtgtacgttgctgcaataaatggtacagacaattaacatcatcgatggtggccgcatgtgaatgggcagacactgatgactatcgcctaattgatgccctttttgaactggatccgagctgcatagaggatgtggattgggacaatcttcttgaccacagggatggagagttatgtcgaaagagatggaaacagatggttcgtcaaataagtcaacatgaaaacaagtcatttgctgcacaggtagaagtgttagctaagagataccgtcctgatttggttggagcaagagaggcctgggatagaaaaccacttgttccatga

SEQ ID NO: 138 - protein, 456 aa, Nicotiana tabacum
MGTKAPGESKDRDIKRKKERGGGKQPGKSSIDRCEDAVENIVKKKNTFKNEREKMHDALVDTKTIAHKSDSETQHSEVKRKRRKEKRKKEDGQVDIVTGVNQGDVSTIVEIEDNKTDDANIRKRKKKKLGNNFKDLSHERSEKRVRFSGDVRVFPPSVDPSDEKHEINEEKLLHGKWFTKEEDEIVKDAVYKYIEVHNLGKEGLQKVLNSISHPEVRGCWKKIGSAIPYRPYGAVYQRAQRLFRSGEKRKYTEEEYEMMRKYHGEHGTKWKVLADELGKHWIHVGNAWNRIKLANQKKGIWAQEEIQTLFDLVNADLLLKLCEEKKSKRGMLRDNISWSKISDKLSTRSGVRCCNKWYRQLTSSMVAACEWADTDDYRLIDALFELDPSCIEDVDWDNLLDHRDGELCRKRWKQMVRQISQHENKSFAAQVEVLAKRYRPDLVGAREAWDRKPLVP

SEQ ID NO: 139 - DNA, 2062 bp, Nicotiana tabacum
agaagccaattttggtgcattgcaagaagacgcacacgtgacattgtccaaaagaggcatggtcctaggagatgagaaggttggtgtgcacatgatgttggagaagcaatccaataaaaggaaaaaaaatgctgcccctaatggttgtgaagtgaaaaaaggtgatgttaaagctgttgagcgtgatctatgtttcaaggaagagaagctctcttctgtagggaccaggaaagaaatggataaggaaaagatgggaactaaagcacccggagaaagtgaagatcgtgacatcaagagaaagaaagaaaaaggtgacagaaaacagcccgggaagttcagtaaagataggagcgaagatgctgtcaaaaatattgtgaagaagaaaaatatatcaaagaatgagcaggatacaatgcatgatgtacttgtagacaccaaaacaattgctcataaaagtggaagtgatacacatgacagtgaagtggttgagacactcagcgagggctctggtggaaatggtatagccgaggagaagaggaagaaaaggaaaaaggaaaagaggaaaaaagaggatggacgggtagatattgtgactggagtcaatcaaggtgatgtttcaaccatagaagagatagaagatagcaaaatagatgatgctaacatcagaaagaggaaaaagacaaggacacaattgtaaagatctttcacatgaaaagagtgataaaagagtgagatttacaggtgaggtacaggttttccctccatccagttatccaagtgatgagaagcatgaaattaataaagaaaaattactgtacggcaaatggttcacaaaagaagaagatgaaattgtcaaagacgctgtttatagatacatcgaggtacataacttgggcggagacgggttgccaaaagtgttggactctaaatctatccctgaattaaggggctgctggaaaaagatatggaaggctataccatacaggccttatatagcagtttataaacgtgcacaacgtttgtttagaatgggtgagaagggtaaatggactgaagaaaagtatgagatggtacgaaagttctatggagaacatgggcccaagtggaagatcttggctgatgaacttgggaaagatagggtacatgtgggaaatgcatggcataggataaaactggacaatctcaaaaaaggaaattgggctcaggaggagatccagactttgtttgatttgctaaacgctaatctgcaactgaagctttttgaagagaagaaatctaagcatgggatgttacgggataatatttgctggagtgaaattagtgacaaattgtccaccaggattgctctaaattgctgcaacaaatggtacagacaattaacatcaccgatggtggctgcaggtgaatgggcagatactgatgactatcgcctaattgatgccctttttgaactggatgcaagctgcatagaggacgtggattgggacaatcttcttgaccacagaagtggagagttgtgtcgaaaaagatggaaccaaatggttcgtcagctaagtcaacatgaaaataagtcatttgccgtacaagtagaagttctagctaagagataccgcccggatttggttggagcgagggaggcttgggatagaaaaccagttggcccatgatatgcccatcattcagcacggacattcacatttctgtagagtagatgctcaaggaacatgtattctgaggcaggtcaaggtatcagtaggtgcgatattctgtaccctttacttagcaatcagtttgaagctagcttagacatatttttttaaaaattattcaactttatataggtcaaatcgactacatcgagtgcaggcagtctgtacagatcagtcactgaatgaactgttgttgtctacaaacttctgccgctcttttttcctcttttttgtttgttgttgtcaagaaaaggtctatcaactgagctgcaaagtgaatcactttcctttgattagctgtacatgagatacggtcttataatcaagattgataaatgacttgtactcctggt

SEQ ID NO: 140 - DNA, 1017 bp, Nicotiana tabacum
atgatgctaacatcagaaagaggaaaaagacaaggacacaattgtaaagatctttcacatgaaaagagtgataaaagagtgagatttacaggtgaggtacaggttttccctccatccagttatccaagtgatgagaagcatgaaattaataaagaaaaattactgtacggcaaatggttcacaaaagaagaagatgaaattgtcaaagacgctgtttatagatacatcgaggtacataacttgggcggagacgggttgccaaaagtgttggactctaaatctatccctgaattaaggggctgctggaaaaagatatggaaggctataccatacaggccttatatagcagtttataaacgtgcacaacgtttgtttagaatgggtgagaagggtaaatggactgaagaaaagtatgagatggtacgaaagttctatggagaacatgggcccaagtggaagatcttggctgatgaacttgggaaagatagggtacatgtgggaaatgcatggcataggataaaactggacaatctcaaaaaaggaaattgggctcaggaggagatccagactttgtttgatttgctaaacgctaatctgcaactgaagctttttgaagagaagaaatctaagcatgggatgttacgggataatatttgctggagtgaaattagtgacaaattgtccaccaggattgctctaaattgctgcaacaaatggtacagacaattaacatcaccgatggtggctgcaggtgaatgggcagatactgatgactatcgcctaattgatgccctttttgaactggatgcaagctgcatagaggacgtggattgggacaatcttcttgaccacagaagtggagagttgtgtcgaaaaagatggaaccaaatggttcgtcagctaagtcaacatgaaaataagtcatttgccgtacaagtagaagttctagctaagagataccgcccggatttggttggagcgagggaggcttgggatagaaaaccagttggcccatga

SEQ ID NO: 141 - protein, 338 aa, Nicotiana tabacum
MMLTSERGKRQGHNCKDLSHEKSDKRVRFTGEVQVFPPSSYPSDEKHEINKEKLLYGKWFTKEEDEIVKDAVYRYIEVHNLGGDGLPKVLDSKSIPELRGCWKKIWKAIPYRPYIAVYKRAQRLFRMGEKGKWTEEKYEMVRKFYGEHGPKWKILADELGKDRVHVGNAWHRIKLDNLKKGNWAQEEIQTLFDLLNANLQLKLFEEKKSKHGMLRDNICWSEISDKLSTRIALNCCNKWYRQLTSPMVAAGEWADTDDYRLIDALFELDASCIEDVDWDNLLDHRSGELCRKRWNQMVRQLSQHENKSFAVQVEVLAKRYRPDLVGAREAWDRKPVGP

SEQ ID NO: 142 - DNA, 4971 bp, Nicotiana tabacum
  misc_feature (1661)..(1661): n is a, c, g, or t
aaactcctcttcctcaaacagataattaggaggaaaccaaatggatattttttcaagaacaaattatccatatatatactagttctttgctaaccaataatacctagaataaataccagaaaagatcaacgagccaacgtaatattgcaggtgaagggaaggtgaattatgagaaaaaaatatgaaaatatctggtaatactaaggcaatatattgcaggtgaatgaaggtaaattatgaggaaaaaaatgaaaatatacgatgaagagtgatcattgatcaatagcactttgttccctataaagaatttaatttatatatgtcacgtttatcaatccgtacatgacaagtaatcttgtctgggattgagactggtcatatcttgtgctatatgacaagtaatcttgtttcagattgagacatagtcgtatcttatgatatatgacaagtaatcttgtttcagattaagacatggtcgtttcttgtactatatggcaagtaattttgtttgagattgagacatggtcgtatcttgtgctatatgacaagtaatctcgtttaagattgagacatagtcgtttcttgtgctatatgacaagtaattttattttggattgaggcacagttatatctggctggtagatattgagggagaaaggcaatattgaaggttaatttcagctatttattgaagagaaaatgaaaggaattcaaaagaaggaagtttttgaagattttgcaatgataggaggtttaataggaatgcaatttatatatgcaggaaattcagtattagcaagttatcttatgtcattaggtttcaaaccttcatcccttgtaattttatcatcatttgccacatttttaatcctttctccattatcctatttttttgaaaggtaactatttttctctcttgttagtgatgatatgtatttatttttttccaaataaatgatcctaaaagaagctaatgtatgaatgttattaatgttgcaggaatcaatggccaaagcaaatgaatttgaagttattgattcaattattattaatttcttttggagggtaagccatgtatttttattttctttattcttttaaaaaaaaatccggagcattctgaaaacttagagatccgactacaaaaagacatgcaacctaatataggcaggattaaccgaggctgtccagacatgcatagaccaactaaacaacattcccgtaacaattggggttacgactggtctaattgcaagcgcattagagggaaaaaaaatctttcgtacgtgagaaaatagagattatacaaggagctactgcagaggcgaattcaacgtttagagtcaactggttgagaatggatgtgaagtattacacatttatgattttttttcttcataatgtaataataagtaattcgagccaaaagtagtgaattcaattgaacgagcacgctctagatctgcctctaggagctagctagtttagtttgaagttttggcatgcttaattagtatatcaacattttgctttttttttttttttgcagggtgacactattccaatctttatacataaagggaatcaatttgacttcacctgcaatggcaacagctatgccaaaccttgccccaggacttatctttctcatagcttgggcnttcctgttagagaaactataaaaagggcagtccggtacactaagctcccgctatacacgaggtcctataaagagtcggactacattggatttattgatcagatactagtacttaaaaagaaaaatgaaaggggcaagttacacatttggccactcggccaaaaatatttgtacatatcctagccggtatacacatattatacattaatcatagacggctatatatatatatatatatatactgactatttttttgggtgggcagctatacagtgtaaaaatcctatttatttaataattaatagagggggaagaaagggaaatggtttcttctaattatttacttgctttagttgcaattctaatttctatgaccttacatgcagatgagagaaggtggagttaaagtgcaaatacagcaaagtcaaaattttaggaacactattgtgcataacaggggcaattctaatgagcctaatgcaaagtagttcaaatgctcacataccagaaaaagaggctcagttttctttaccatctccaccacatgatgatgatgatgctgacatatttaatgaagataagatcaagggttcaatctatctcatggcagcaatcttggtgttatcaagtagtgttgttttgcaggtatatagacagtattaactaatacttactcccaattagcgagtaacaagagcctcgccaaaatttgagcgaggatgttctaataagtacctcgctaatttgagcgtggacgttcatataagttccttgcttattatgagcgaggacgttctaataagggcctcgctaattataagcgaggatgttctagtaagaaagggcctcgctaattatgagcgaggatgttctaataagggcctcgctaattatgagcgaggacgttctaataagggcctccctaattatgagtgaggacgttctaataagggcctcgctaattatgagcgaggacggtctaataagggtcttgctaattatgagcgaggacgttctataaggacctcgctaattatgagtgaggatgttctaataaggaagggtctcgctaattatgactgaggacgttctaaaagggcctcagaacgtcctcgctcataattagcgagggcattctaataagggcctcgctaattatgatcgaggatgttctaataagggcattgctaataagctaggatgttctaatcagaggcggatccaggatttaaaccctatggatttagcctttaagatttttagcattaaactcaatatatttttaaagttacgggttcaaatctactatttgttgcaattttagtatagattttacacaaatttatgctacgcatcgaaagttatgggctcaattgaacccatcatatatacgctacatacgcgcctggttctagtgaggtcctgctaatttcttttgacgtggcatttgtgttccctaaatttagcaaggttataatctttcgcgctaaaaggaaccttttcctcgttattgtatactagttgtatattagcccgtcgctattgttccttttagtccccatagtgtgggataatactgggtatattgttattgttgtcgttattcttattgttccttttagtgatgaactgtatatttcctcgctaaaattcgaaatgacatttttcttgtatagtgtcactttgctagtgtagttcttcctaatatgttggttaattaacaacttttcaggcaacaaccttgggatattttccagcaccaatctccttatctgctataacttccttcataggcatgtcattgactgtaatagttgagttagttcaagaacattgcttggagattggatttcccttaaatatccgcgacttgattggcttttccttactggtaattcaccagttaccttaattaataatgttatatgtgcaatttgttatgtgaacgggagcctaggcgtaactgataaagttgttgtcttgggaccaggaggttacgggttcgagccgtggaaacagcctcttgcagaaatgtaaggtaaggctgcgtacaatagacccttgtggtccgatccttgacctcgcgcatagcgggagcttagtgcaccgggctgccttttttttatgtgcaaattgttatgtagacaaattgtagggtaaagaaaaatgattctgatatttatacaaattttttggttgtaataggcaggtatagtaagtggaatatgcataagcttcaataattgggcaatgaagaaaagagggccagtgttggtttctgtttttagtcccattggaactgtgttagcagttgttctctctacaatcaccttaagggactcgatcactcttggaaggtacatgcattatcaatcaacctcccaaaaaaattcaaataaatgcatacatgcgcgcatacacacatgctcacatatcaaaaggacgtcctggtgcactaagctcccgctatgcatgaggtccatggaagggccggaccacatgggtctattgtacgtaaccttaccctccatttctgcaagaggctatttccacagctcgaacccgtgacctcctggtcacatgcagtggcaaagccacatggttataagagtggtcaattgaccacctttcgtcgaaaaattgtattgtgtatataggtaaaatattacgttttagatataacacatattgaacaccgtttgtcggaaatttttatcacttcttttaaatttgaatacccttggaaaaatttctagtttcgccactggtcacatggtagcaactttaccagttacgtcatgctccctttcacacatactcaattactcacacatcactttttgaaaaataagacgaagtataggtttaggatggaagtaaagctttattaaaactccatagcttgaaacccaaacaaatgtactagttcaactgtgacaattggccgacactgcttacataaaatcctgtgcacgccactgattaataatcgataattggagtgatgactttagcttctttctgcagccttgctggtatgttttttatgttcatcggtctgtatttcgtgctatgggctaaagggaaagaagagtatttgatcagttcttcttccagttcctcagaaagtgatgaatatgatgtggagaagcctcttttaagttaaatctaattcttattattcttttctcttgttcattgttttgtatatacatatagaaaaatatgaagtagacagcttatttttagttagtttacatatgatgtgtatgcatcttcgttccgatttatgtgatggtatttgattgggt

SEQ ID NO: 143 - DNA, 627 bp, Nicotiana tabacum
atgagcctaatgcaaagtagttcaaatgctcacataccagaaaaagaggctcagttttctttaccatctccaccacatgatgatgatgatgctgacatatttaatgaagataagatcaagggttcaatctatctcatggcagcaatcttggtgttatcaagtagtgttgttttgcaggcaacaaccttgggatattttccagcaccaatctccttatctgctataacttccttcataggcatgtcattgactgtaatagttgagttagttcaagaacattgcttggagattggatttcccttaaatatccgcgacttgattggcttttccttactggcaggtatagtaagtggaatatgcataagcttcaataattgggcaatgaagaaaagagggccagtgttggtttctgtttttagtcccattggaactgtgttagcagttgttctctctacaatcaccttaagggactcgatcactcttggaagccttgctggtatgttttttatgttcatcggtctgtatttcgtgctatgggctaaagggaaagaagagtatttgatcagttcttcttccagttcctcagaaagtgatgaatatgatgtggagaagcctcttttaagttaa

SEQ ID NO: 144 - protein, 208 aa, Nicotiana tabacum
MSLMQSSSNAHIPEKEAQFSLPSPPHDDDDADIFNEDKIKGSIYLMAAILVLSSSVVLQATTLGYFPAPISLSAITSFIGMSLTVIVELVQEHCLEIGFPLNIRDLIGFSLLAGIVSGICISFNNWAMKKRGPVLVSVFSPIGTVLAVVLSTITLRDSITLGSLAGMFFMFIGLYFVLWAKGKEEYLISSSSSSSESDEYDVEKPLLS

SEQ ID NO: 145 - DNA, 5444 bp, Nicotiana tabacum
aatcttcttctagtttttccatattaacctctcttttttctctcattgctcattgggtccaatttttgtgggcaaaagtgcaagaaaagttgctaaaatggcacttcctgagacacagcaagattcaaaagctttactagatgcttgggattacaaaggaagaccagctcttagatcctcctccggtggttgggctagtggcgcaatgattttaggtgtgaatttaattttctctccctctctcaaattaaaccgtcacgttaaatggcgtgattagataaggtaggagtccatgtcaaacctctaccatctcaaggcggctttaataagaaaaaacggcgagattagatgggaagagatagtcttgtgagtaagcatagcatttctggctgaatcagaacaacccaatattactatatggattgaggagggagttttagtctaactggctgtacggatatgctaatagatagaggattttcatgtcccgaaaataagaaagtagtttgtctgccatactggatgcttcattaaatgtgctaatgcgcattttatgtaaggggttgatatgtatccttacctgatgattaggtcgagtacctcgttggacctcgatccgtctaaccgagtctattatgaatatgcataaagaagtgctcctaggtgtttataggaaataaaaattcataatttttctggcttctgttgctatctattgtctattttcgtcttcttgagccgagagtctttcagaaacaacctctctactcctctgaggtagaggtaaggtttgcgtacactctactctccccagatcccacttgaaggattttactgggttgttgttgtcgttattttttgcactttccattctttgatctttctacttcgtttttttcaaccatgttcttgatttttgaataataggtgttgaagctgtggagaggctaacaacactagggattgctgtaaatttggtgacatatttgactggaactatgcatttagggaatgctactgcagccaacaatgttaccaattttcttggaacttctttcatgctcactttacttggtggttttgttgctgacactttcctcggaaggttcgtatattatactctctccgtctcagtttatatgatgctgttcagatttggagagtcaaacttcttaattttgaccaacaacgaggacatgcatttggatttttttttaacatcattcctatttatcttaatttttgcaggtatcttacaattggtatctttgccactgttcaagcaatggtaagtgtcaatttttgttaattcttttccttatgtgacgattgaaattaatgcatgtaatatttttaaagaatctgtgatgaggagactcgaaatattcaagaaagactatatagcataaattaaatgtaagagtcaagagggagatgaagttgatctaatcacattcaaaaatcagtcatattatatttgttgtgaagaggaaattcgagaaaggaaaaatgagaaaaattaaataaaaataatgacacttgatctaattaatttgttgtgaagaagaagactaatgatgattctacaaagaggaaagaggaggaagaaacatttattcattacactagttgcagttctcacacataacaaaaattaatctttacattgtccgcatacataattcagtttcaagaaataataatattaattaaaaagatttaattttaatgtcaaggaaaaatttattttaacatcttatcataggcagtggccggaagcaagatttcactaaggggttaaaaaaattaaaaagtagaagtcaaagggattcaatatctaatatatgtacataaaaaaaattaaccttatatatatacaacataactttaggatgaagggggttcaacgctccgctactgctcataagttacctatcttattatctaagttactgacttcacttattatgaacagttagtataaaaggttttttgcaactctaaccacaatttgtcatttgttatgatgaatagggtgttacaatcttgaccatttccaccataatcccaagcctacgaccaccaaaatgtgaacaagttggtagctcatcatgcatccccgcaaatagcaaacaacttatggtactatacattgccctatacatgacagcactcggcaccggcggcctaaaatcgagcgtctccggctttggcaccgaccaatttgacgattctgacaaaaaagaaaaaggtcaaatgataaaattcttcgactggttctttttctttattaatgtaggctcgctcggtgcagtaacagtattggtgtatattcaagataatttgggaagagagtggggttatggcatatgtgcatgtgctattgttattggacttgttgtgttcttatctgggacaaggaaatataggttcaagaaacttgtggggagtccattgacacaaattgcttcagttattgtggctgcttggaaaaaaagacatttggaattaccttcagattcttcacttctctttgaaattgatgatatttttggtgaaggaaataaaaaaagcaaacaaaagttgcctcatagcaaggaataccggtgagttttccatctactttttctagtttagctttatatatgttgaccttaagtgtatataatttatacgctagaagatcactaaatatataaggattttaattatatacactgatagtgcattagcctctctgcctcgccaggtaggggtaatgtctgtgtatatactaccctccccagaccctactggtgggattatactggttatgttgttgttgttgttgttgttgttgttgttgttgttgttgttgtatactgatagtgcataacaacaacaataagccagtataatctcacaagtatggtctggagagagtactgtgtatgcatccttacctctacctttagaatatagaaagactgtttaaacctcggctcaagtaaaatgaaaaagaatcagtaacaaccgcaagataataagaaaataaaaatgaaggaaacaagggacattaatagaaacctaagaataagaaatataaggctaacattgatcctactgatagtataagattttttagttaattattatttatttttacgagtcaagatgattaattgagtcctaattctagaagttaggtagatagacattaccccagttgaatcttgtacagtaaagattcttttttttttatctttaatttcttctttttgaataaagaagattcccctttaaatcatgaaaaatttggacgaaggaaaatcattgataggtttcaggagactaatataagccacaaatgagaaaaataatttttctacgtgcgactaatattatttgaagtattgactttatcatttatattgtttacaatttttcataataattcaaagtaggtgtctatgataagtaggtgatgattaattttttttaaaaaaaaaacaaaagagaagttggtgccaaactatgaacttatctccatatatagttggccagttttttatggctaacaatcaatcaatttttaaatatctaaattatttccattttgaaatagacagcctataaagtattatttaagatactttgctatttgactcactattgaatgtatctttgtatactagcctaagtttggcggggtgtgtgtggggtggggggtgggggctgcccctaattcggagtagacaaacaaataaccaaaaagataattatatgtaactgtgcgtaataattaaataaaattagttacctagaaaataatacaaacaacatgactcaacgtgattaaacattctttacattgtcagcgacttagcgtaaatatatataaatatttaattacaaactcggtaactaagacaagctataggttcaacgatagtttcaaacacatatacttcaaatagttctgcttatatacatgggcgacactatatgttttaaagtgtggtcacctgaccatcctttgtcggaaaattacattgtgtatataagtaaaatattatattttagaggtatacataatatatattaaatattctttgtcggagattgaacatccttgaataagtttctgacttcgctactgcctatatatgtaggtcatagttttgaccatgtgtttgtcttatttttgcagattcttggacaaggcagcaattaaggaagatcatgatcttgaatctaatggcactaacgttgtaatcaacaagtggaaattagcaaccttaaccgatgttgaagaagtaaaattattaatcagaatgttaccaacttgggccacaactattatgttctggactgtctatgcacaaatgaccacattttctgtgtcacaagctacaacaatggatcgtcacattggaacctttgaaattccaccggcttcactcacagtatttttcgtcggaagtatactcttgaccgtaattttctacgatagggttatcgttcccatttgtcgtcgtttcatgaataaacctcatggacttaccccattacaaagaatattcacagggttagttctttcaattttggccatgattgctgctgccctaaccgaggttaagaggctaaaagttgcacatttgcatggattggccaatgatgaaaatgctacaattcctttgactgtattttggctagttccgcaattcttgctagtgggggcaggtgaagcatttacatatattggccaacttgattttttcttaagggaatgtccaaaagggatgaagacaatgagtacagggctatttttgagtacacttgcacttggattttttgttagttcaattttggttacaattgtgcatattgtgactgggacaaaaaatccatggctagctgacaatttgaaccaagggaggttatatgatttctattggcttttggcaatattgagtgtgtttaatttgatgtttttcttgtattcgtcgagaaaatatgtgtacaaggagaagagacttgctgaaatggggattgaattggaagatgatggaccggtttgtcattgaaatacataaagactctatcatcaacaacaaagggtatatcggaaactacctctctatcttcgatcgtattggatatgcgcttgttactccatcatcaacaaaaaagaaaaagaaaaatgagatttcatttttttttttttggctttaacttttgccttttattgattgagcttgtgaaaactctttattggaagagttatgtaacataactttgcttttaattatatgtacaaagaatgggaaagaggtaagataatgaaaaggtctagagctctttttattattcctttccttttttactatataccataataatgtaatgaattgcaatgcaacactagggtttcatacttctgaaacctttttattttgctttaa

SEQ ID NO: 146 - DNA, 1785 bp, Nicotiana tabacum
atggcacttcctgagacacagcaagattcaaaagctttactagatgcttgggattacaaaggaagaccagctcttagatcctcctccggtggttgggctagtggcgcaatgattttaggtgttgaagctgtggagaggctaacaacactagggattgctgtaaatttggtgacatatttgactggaactatgcatttagggaatgctactgcagccaacaatgttaccaattttcttggaacttctttcatgctcactttacttggtggttttgttgctgacactttcctcggaaggtatcttacaattggtatctttgccactgttcaagcaatgggtgttacaatcttgaccatttccaccataatcccaagcctacgaccaccaaaatgtgaacaagttggtagctcatcatgcatccccgcaaatagcaaacaacttatggtactatacattgccctatacatgacagcactcggcaccggcggcctaaaatcgagcgtctccggctttggcaccgaccaatttgacgattctgacaaaaaagaaaaaggtcaaatgataaaattcttcgactggttctttttctttattaatgtaggctcgctcggtgcagtaacagtattggtgtatattcaagataatttgggaagagagtggggttatggcatatgtgcatgtgctattgttattggacttgttgtgttcttatctgggacaaggaaatataggttcaagaaacttgtggggagtccattgacacaaattgcttcagttattgtggctgcttggaaaaaaagacatttggaattaccttcagattcttcacttctctttgaaattgatgatatttttggtgaaggaaataaaaaaagcaaacaaaagttgcctcatagcaaggaataccgattcttggacaaggcagcaattaaggaagatcatgatcttgaatctaatggcactaacgttgtaatcaacaagtggaaattagcaaccttaaccgatgttgaagaagtaaaattattaatcagaatgttaccaacttgggccacaactattatgttctggactgtctatgcacaaatgaccacattttctgtgtcacaagctacaacaatggatcgtcacattggaacctttgaaattccaccggcttcactcacagtatttttcgtcggaagtatactcttgaccgtaattttctacgatagggttatcgttcccatttgtcgtcgtttcatgaataaacctcatggacttaccccattacaaagaatattcacagggttagttctttcaattttggccatgattgctgctgccctaaccgaggttaagaggctaaaagttgcacatttgcatggattggccaatgatgaaaatgctacaattcctttgactgtattttggctagttccgcaattcttgctagtgggggcaggtgaagcatttacatatattggccaacttgattttttcttaagggaatgtccaaaagggatgaagacaatgagtacagggctatttttgagtacacttgcacttggattttttgttagttcaattttggttacaattgtgcatattgtgactgggacaaaaaatccatggctagctgacaatttgaaccaagggaggttatatgatttctattggcttttggcaatattgagtgtgtttaatttgatgtttttcttgtattcgtcgagaaaatatgtgtacaaggagaagagacttgctgaaatggggattgaattggaagatgatggaccggtttgtcattga

SEQ ID NO: 147 - protein, 594 aa, Nicotiana tabacum
MALPETQQDSKALLDAWDYKGRPALRSSSGGWASGAMILGVEAVERLTTLGIAVNLVTYLTGTMHLGNATAANNVTNFLGTSFMLTLLGGFVADTFLGRYLTIGIFATVQAMGVTILTISTIIPSLRPPKCEQVGSSSCIPANSKQLMVLYIALYMTALGTGGLKSSVSGFGTDQFDDSDKKEKGQMIKFFDWFFFFINVGSLGAVTVLVYIQDNLGREWGYGICACAIVIGLVVFLSGTRKYRFKKLVGSPLTQIASVIVAAWKKRHLELPSDSSLLFEIDDIFGEGNKKSKQKLPHSKEYRFLDKAAIKEDHDLESNGTNVVINKWKLATLTDVEEVKLLIRMLPTWATTIMFWTVYAQMTTFSVSQATTMDRHIGTFEIPPASLTVFFVGSILLTVIFYDRVIVPICRRFMNKPHGLTPLQRIFTGLVLSILAMIAAALTEVKRLKVAHLHGLANDENATIPLTVFWLVPQFLLVGAGEAFTYIGQLDFFLRECPKGMKTMSTGLFLSTLALGFFVSSILVTIVHIVTGTKNPWLADNLNQGRLYDFYWLLAILSVFNLMFFLYSSRKYVYKEKRLAEMGIELEDDGPVCH

SEQ ID NO: 148 - DNA, 5762 bp, Nicotiana tabacum
cctctaggccatggctataaaagggtaatggaatcaattgaatctgcaatcttcttctagtttttccatattaacctttttttcttattgctcattgggtccatttttgtgggcaatagtgcaagaaaagttgcaaaaatggcacttcctgtgacacaacaagattcaaaagctttaccagatgcttgggattacaaaggcagaccagcccttagatcctcctctggtggttgggctagtggtgcaatgattttaggtgtgaatttaattctctctctctttttatctctctctcaaaataaaccgtcacgttaaatggcgggattagacaaggtaggagtccatgtcaaactcccgccaacttaaggtggctttaataaggaaaaatggcgagattagacaggatgagatagtcttgagagtaagcatagcatttatggtcgaatcagaacaacccaatatcgctatattgattgaggagagagttctagtctaactggttgtacgggtatgctaatagataaatgattttcatgcccgcaaaataagaaagtagtttgtctgccatactggatacttcgttgaatgtgctaatgtacattctatgtaaggagttgatatgtatccttacctgatggtaatggttaggtcgtgtacctcgttggacctcgatccgcctatgcagaaagaagtgctcctaggtgtttataggaaatacaaactcattattttctcggcttctatttttgttacatatctattgtctattttcgttttcttgagtcgagggcctgttggaaacagtctctctactcctccggaatatgggtaaattcttcttatactctactctccccaagccctacttgtgggattttacttggcggttgctgttattgttgttgttcttttttgcaatttctattctttgatcttttttttttttttttttttttttttttttttttttaacatgttcttgattttgaataataggtgttgaagctgtggagaggctaacaacactagggattgctgtaaatttggtgacatatttgactggaactatgcatttagggaatgctactgcagccaacaatgttaccaattttcttggaacttctttcatgctcactttacttggtggttttgttgctgacactttcctcggaaggttcgtatattatactttctccgtctcaatttatataatgctgttcagatttggagagtcaacttcttaattttgaccaacaacgaggacatgcatttggatttttttttttaacatcatttctatttatcttaatttttgcaggtatcttacaattggtatctttgccactgttcaagcaatggtaagtgtcaatttttgttaattcttttccttatgtgatgattgaaattaatgcatgtaatttttttaaagaatctgtgatgaggagactcgaaatattcaagaaagactatatagcataaactaaatgtatgagtcaagagggagatgaagttgatctaatcacattcaaaaatcagtcatattataattgttgtgaagaggaaattcgagaaaggacaaatgagaaaaattaaataaaactaatgacacttgatctaattaatttgttgtgaagaggaaaatcgaacaacgaagaagactaataatgattctacaaagaggaagaaacatttattcattacactagttgcagttctcacgcataaaaaaaagtttattcgttacattgtcaccatacaaaattcagtttcaagaaataataatattagttaaaaaaaattaactttaatatcaagaaaaattattttaacatcttgtcataagtagtggcggaagcagaattttactaaggaatttaaaaaattttaaaaaaattaaacacatggtcgaagctaaaggtattcaagtatgtttaatatatgtacataaaaaaatttaaccttatttatatacatcataactttcggacgaagggggttcagcgctccgcttctgcgcgtaggttacctatcttattacctaagttactaatttcatttattatgaacagttagtatagaaggttttttgcaactctaaccaaaatttgtcatttgttatgatgaatagggtgttacaatcttgaccatttccaccataatcccaagcctacggccaccaaaatgtgaacaagttggtagctcatcatgcatccccgcaaatagcaaacaacttatggtcctatacattgccctatacatgacggccctcggcaccggcggcctaaaatcgagcgtctccggctttggcaccgaccaattcgacgatgctgacaaaaaagaaaaaggtcaaatgataaaatttttcgattggttctttttctttattaatgtaggctcgctcggtgctgttacagtattggtgtatattcaagataatttgggaagagaatggggttatggaatatgtgcatgtgctattgttattggacttgttgtgttcttatctgggacaagaaaatataggttcaagaaacttgtggggagtccattgacacaaattgcttcagttattatggctgcttggaaaaaaagacatttggaattaccttcagattcttcacttctctttgaaattgatgatatttttggtgaaggaaataaaaaaaacaagcaaaagttgcctcatagcaaggaataccggtgagttttccatctactttttatagtttatctttatatatgttgacattcgatgtaaataattttaacactatgagatcattaaatatataagaattttaattatatatattaatagtacataacaacaacaataaactagtataatttcataagtaggatctagaaaaggtagtgtgtacgcatccttacccagtggcgaagctagaaaatttaataaggatgttcaaattttgaacaccctttcccagtgggctatacaagggtgttcacagtctatttttttaattaataataagtaatattttaccttatacatagtataatttttcggtaaagggtgttcagttgaccatcgttgggctaacatagcttcgcccctgtccctacccctaccttgaaaaggtcaaaagattgtttaaactctcggctcagtaagaataaaaaaaaatagcaacaaccgcaagataataagaaaacggaagcgaaggaaacaacatgcaataatagaaatctaaagattttttacagtatcaacataatttaacgtatgatagaagattagttagttactaatttttttttttttacaagtcaagaatgattaagtcctaattctagaagttagatagatagacattaccctagttgaatctggtaccataaagattctctctttttatctttaatttcttctttttgtaaaaagaagattccctttagaatcatgaaaaaattggacgaaggaaaagcattgataggtttccaggagactaatataagccactaatgagaaaaaagagttatctacgtgcgactaataatattatttgaagtattgacttgatcacttgcattatttacaattttaaataataatccaaagtaggtgtctatggtaagtaggtgatagttatttaaaaacaaaaaaaagcaaaagagaagttggtgccaaactatgaacttatccccatatgtagttggccagtttttgatgggctaacaatcaaccaatttttaaatatctaaattatttccattttgaaatggacagcctataaagtattatatgagatactccccgggttcaaaataagtaattttttggtttttttcttgtgatccaaaataagtaatttttccagatttcaagaatgaattaattatttttttcctacattgtccttggagtaattaatgtttgagtatgtataaggagtatttatgtgaagagacaataaaggttaatattgtcaatttcactgctaattaatgttaaaagatgaattttttaatatgtgtgaaaacaaccaaaaaattacttattttagaccggagggagtactttgttatttgactaactattgaatgtatgggggtggggtgggagtgggggtctctcccctacaatcggagtagacaaacgaataacctaaaagataattatatgtaactgtgcataccaagtaaaattagttacctagaaaataataaaacaaacgacatgattaacgtgcttaaatattttttacactgtcaacgacttggcatggatacaagttaaattttattttagtcattcgttagatattcttgccctttttgtgctcaagaatataatgaagtttgcaacatttcccatataaaactttagaaaatatatttttcaaaaaccaaaatagcaatgaattaaaggactattgcatgtaggttcgatgataatttcagaacctttaggggtcgtttggttaagaaataagttattcaggattaattatcccagaactattgtcccccccccccccacaatagggataaaaataatactataatctcataattaattatctcttatttttcgtactaaacaagcccttaaacttcaaatcctagtcccgccaatctatgtaggtcatagttttgaccatgtgtttgtcttatttttgcagattctttgacaaggcagcaattaaggaagatcatgatcttgaatctaatggcactaacgttgtaatcaacaagtggaaattagcaaccttaaccgatgttgaagaagtaaaattattaatcagaatgttaccaacttgggccacaactattatgttctggactgtctatgcacaaatgaccacattttctgtgtcacaagctacaacaatggatcgtcacattggaaccttcgaaattccaccggcttcactcaccgtatttttcgtcggaagtatactcttgaccgtaattttctacgatagggttatcgttcccatttgtcgtcgtttcatgaataaacctcatggacttaccccattacaaagaattttcacagggctagtcctttcaattttggccatgattgctgctgctttaaccgaggttaagaggctaaaagttgcacatttgaatggattggctaatgatgaaaatgctacaattccattgacagtattttggctagttccgcaatttttgctagtgggggcaggtgaagcatttacatatattggccaacttgattttttcttaagagaatgtccaaaaggaatgaagacaatgagtacagggctatttttgagtacacttgcacttggattttttgttagttctattttggttacaattgtgcatgttgtgactggggcaaaaaatccatggctagctgataatttgaaccaagggaggttatatgatttctattggcttttggcaatattgagtgtgtttaatttgatgtttttcttgtattcgtcgagaaaatatgtgtacaaggagaagaggcttgctgaaatggggattgaattggaagatgatggaccggtttgtcattgaaatacgtaaacaactctatcatctatagtagggggtctgtcgaaaactacctctctatctttaactgtactgaatttagctggcacaagcatattttgtagatcttggaagcatgtgaagaagaaatataagttgtcgtgatctagttgggaattgttatctcgtttcccgattaattttacagaaaatgataatgtataaccgctacatatatataacattgtatttaaattttt

SEQ ID NO: 149 - DNA, 1785 bp, Nicotiana tabacum
atggcacttcctgtgacacaacaagattcaaaagctttaccagatgcttgggattacaaaggcagaccagcccttagatcctcctctggtggttgggctagtggtgcaatgattttaggtgttgaagctgtggagaggctaacaacactagggattgctgtaaatttggtgacatatttgactggaactatgcatttagggaatgctactgcagccaacaatgttaccaattttcttggaacttctttcatgctcactttacttggtggttttgttgctgacactttcctcggaaggtatcttacaattggtatctttgccactgttcaagcaatgggtgttacaatcttgaccatttccaccataatcccaagcctacggccaccaaaatgtgaacaagttggtagctcatcatgcatccccgcaaatagcaaacaacttatggtcctatacattgccctatacatgacggccctcggcaccggcggcctaaaatcgagcgtctccggctttggcaccgaccaattcgacgatgctgacaaaaaagaaaaaggtcaaatgataaaatttttcgattggttctttttctttattaatgtaggctcgctcggtgctgttacagtattggtgtatattcaagataatttgggaagagaatggggttatggaatatgtgcatgtgctattgttattggacttgttgtgttcttatctgggacaagaaaatataggttcaagaaacttgtggggagtccattgacacaaattgcttcagttattatggctgcttggaaaaaaagacatttggaattaccttcagattcttcacttctctttgaaattgatgatatttttggtgaaggaaataaaaaaaacaagcaaaagttgcctcatagcaaggaataccgattctttgacaaggcagcaattaaggaagatcatgatcttgaatctaatggcactaacgttgtaatcaacaagtggaaattagcaaccttaaccgatgttgaagaagtaaaattattaatcagaatgttaccaacttgggccacaactattatgttctggactgtctatgcacaaatgaccacattttctgtgtcacaagctacaacaatggatcgtcacattggaaccttcgaaattccaccggcttcactcaccgtatttttcgtcggaagtatactcttgaccgtaattttctacgatagggttatcgttcccatttgtcgtcgtttcatgaataaacctcatggacttaccccattacaaagaattttcacagggctagtcctttcaattttggccatgattgctgctgctttaaccgaggttaagaggctaaaagttgcacatttgaatggattggctaatgatgaaaatgctacaattccattgacagtattttggctagttccgcaatttttgctagtgggggcaggtgaagcatttacatatattggccaacttgattttttcttaagagaatgtccaaaaggaatgaagacaatgagtacagggctatttttgagtacacttgcacttggattttttgttagttctattttggttacaattgtgcatgttgtgactggggcaaaaaatccatggctagctgataatttgaaccaagggaggttatatgatttctattggcttttggcaatattgagtgtgtttaatttgatgtttttcttgtattcgtcgagaaaatatgtgtacaaggagaagaggcttgctgaaatggggattgaattggaagatgatggaccggtttgtcattga

SEQ ID NO: 150 - protein, 594 aa, Nicotiana tabacum
MALPVTQQDSKALPDAWDYKGRPALRSSSGGWASGAMILGVEAVERLTTLGIAVNLVTYLTGTMHLGNATAANNVTNFLGTSFMLTLLGGFVADTFLGRYLTIGIFATVQAMGVTILTISTIIPSLRPPKCEQVGSSSCIPANSKQLMVLYIALYMTALGTGGLKSSVSGFGTDQFDDADKKEKGQMIKFFDWFFFFINVGSLGAVTVLVYIQDNLGREWGYGICACAIVIGLVVFLSGTRKYRFKKLVGSPLTQIASVIMAAWKKRHLELPSDSSLLFEIDDIFGEGNKKNKQKLPHSKEYRFFDKAAIKEDHDLESNGTNVVINKWKLATLTDVEEVKLLIRMLPTWATTIMFWTVYAQMTTFSVSQATTMDRHIGTFEIPPASLTVFFVGSILLTVIFYDRVIVPICRRFMNKPHGLTPLQRIFTGLVLSILAMIAAALTEVKRLKVAHLNGLANDENATIPLTVFWLVPQFLLVGAGEAFTYIGQLDFFLRECPKGMKTMSTGLFLSTLALGFFVSSILVTIVHVVTGAKNPWLADNLNQGRLYDFYWLLAILSVFNLMFFLYSSRKYVYKEKRLAEMGIELEDDGPVCH

SEQ ID NO: 151 - DNA, 5082 bp, Nicotiana tabacum
ctagtttttccatattaacctttttttctcattgttcattgggtccatttttgtgggcaaaagtgcaagaaaagttgctaaaatggcacttcctgaaacacagcaagattcaaaagctttaccagatgcttgggattacaaaggaagaccagctcttagatcctcctctggtggttgggctagtggtgcaatgattttaggtgtgacttcaattatctctctatctatctctctctcaaattaaaccgtcacattaaatggcgggattagacaaggtaggagtccatgtcaaacccccgccatctttaggtggctttaataagaaaaaatggccagattagacgggaagagatagtcttgtgagtaagcattaacatttttggccgaatcagaattgaggagggagttctagtataacaggttgtacgggtatgctaatatatagaggattttcatgtcttgaaaataagaaagtagtttgtctgtcatactggatgcttcattaaatgtgttaatgtgcattctatgtgaggaggagttgatatgtatccttacctgatggttaggtcgtgtacctcgttggacctcgatccgcctaaccgagtctattatgaatatgcagaaagaagtgctcctaggtgtttataggaaatacaaactcattattttcctggcttctatttctgttacatatctattgtctattttcgttttcttgagccgagtgtctttcggaaacagcctctctattcctctggaatatgagtaaattttgcgtacactctaccctccccaaaccctacttgtgggattttactgggcggtttttgcaatttccattctttgatctttttactttattttttttaaccatgttcttgattttgaataataggtgttgaagctgtggagaggctaacaacactagggattgctgtaaatttggtgacatatttgactggaactatgcatttagggaatgctactgcagccaacaatgttaccaattttcttggaacttctttcatgctcactttatttggtggttttgttgctgacacttttctcggaaggttcgtatattatactctctccgtctcaatttatatgatgcagttcagatttcgatagttaaacttcttaattttgaccaataatatggacatgcatttggattttttttttttgttaacatcatttctatttatcttaatttttgcaggtatcttacaattggtatctttgccactgttcaagcaatggtaagtgtcaattttcgttaattcttttcctcatgtgatgattgaaattaatgcatgtaatttttttaaagaatctgtgatgaggagactcgaaatattcaagaaagactatatagcataaattaaatgtaagagtcaagagggagatgaagttgatctaatcacattcaaaaatcagtcatattataattgttgtgaagaggaaattcgagaaaggaaaaatgagaaaaattaaataaaactaatgacacttgatctaattaatttgttgtgaagaggaaaatcgaacaaggaagaagaagactaataatgattctacaaagaggaaaagaggaggaagaaacatttattcattacactagttgcagttctcatacataaaaaaaagtttattttttacattgtcagcatacaaaattcagtttcaagaaataataatattagttaaaaaaattaactttaatatcaagaaaaatttattttaacatcttgtcataagtagtggcagaagcagaattttactaaggaatttaaaaaaactaaaaaaaattaaacacgtggtcgaagctaagggtattccagtatgtttaatatatatacataaaaaaaaataaccttatttatatacatcataactttcggatgaagggggttcagcactccgcttctgctcgtaggttacctatcttattacctaagttactaatttcacttattacgaacagttagtatagaaggttttttgcaactctaaccaaaatttgtcatttgttatgatgaatagggtgttacaatcttgaccatttccaccataatcccaagcctacggccaccaaaatgcgaacaagttggtagctcatcatgcatccccgcaaatagcaaacaacttatggtcctatacattgccctatacatgacggcgctcggcaccggcggcctaaaatcgagcgtctccggctttggcaccgaccaattcgacgatgctgacaaaaaagaaaaaggtcaaatgataaaattcttcgattggttctttttctttattaatgtaggctcgctcggtgctgttacagtattggtgtatattcaagataatttgggaagagaatggggttatggaatatgtgcatgtgctattgtaattggacttgttgtgttcttatctgggacaagaaaatataggttcaagaaacttgtggggagtccattgacacaaattgcttcagttattgtggctgcttggaaaaaaagacatttggaattactttcagattcttcacttctctttgaaattgatgatatttttggtgaaggaaataaaaaaaacaagcaaaagttgcctcatagcaaggaataccggtgagttttccatctactttttatagtttatctttatatatgttgaccttaagtgtaaataatttatacactagaaaatcactaaatatataaggatttatattatatatactgttagtgcataacatagcctctctacctcaacaggtaggggtaaggtctgtgtacacgctacccttcccatacccaacttgtgagattatattggttatgttgttgttgtatactaatagcgtataaaaacatcaataaaccagtataatctcacaaatatggtctggaaagggtaatatgtacgcattcttatccctaccatgagaaggtagaaaggctgtttagatcctcggttcaagtaaggatgaaaaaaaaaacgcaagataataagaaaatggaagcgaagaaaacaacatgcaataatagaaacataaaaataagaaaatacaaggctaacagtaatcctactgatagtataaagttttttaacagtatcaacataatttaacgtatgataaaagattagttagttactaaattttttttacaagtcaagaatgattaagtcctaattctagaagttagatagatagacattaccctagttgaatctggtacaataaagattctctctttttatctttaatttcttctttttgtaaaaagaagactccctttagattcatgaaaaaattggacgaaggaaaagcattgataggtttccaggagactaatataagccactaatgagaaaaaagagttatctacgtgcgactaataatattatttgaagtattgactttatcacttgcactatttacaattttaaataataattcaaagtaggtgtctatgttaagtaggtgatagttattttttaaaaaaagcaaaagtgaagttggtgccaaactatgaacttatccccatatatagttggccagtttttgatggctaacaatcaaccaatttttaaatatctaaattatttccattttgaaatggacagcctataaagtattatatgagatactttgttatttgactaactattgaatgtatggggtggggtgggagtggggatctctcccctacaatcggagtagacaaacgaataacctaaaagataattatatgtaactgtgcataccaagtaaaattagttacctagaaaataataaaacaaacgacatgatttaacgtgcttaaatattctttacactgtcaacgacttggcatggatacaagttaatttttttttagtcattcgttagatattcttggccctttttgtgcataagaatataatgaagtttgcatataaaatgaattaaaggactattgcatgtaggttcgagggtaatttcagaacccttaggtcgtttggttaagaaataagttatccaggattaattatcacgaaattattgccctcccctcccccaccccccacccccaaaatagggataaaaataatattaaatcccatgattaattatcccttatttttcgtaccagataagtccttaaacttcaaatcatgattccgccaatctatgtagctcatagttttgaccatgtgtttgtcttatttttgcagattcttggacaaggcagcaattaaggaagatcatgatcttgaatctaatggcactaacgttgtaatcaacaagtggaaattagcaaccttaaccgatgttgaagagtaaattattaatcagaatgttaccaacttgggccacaactattatgtttctggactgtctatgcacaaatgaccacattttctgtgtcacaagctacaacaatggatcgtcacattggaacctttgaaattccaccggcttcactcacagtatttttcgtcggaagtatactcttgaccgtaattttctacgatagggttatcgttcccatttgtcgtcgtttcatgaataaacctcatggacttaccccattacaaagaattttcacagggctagttctttcaattttggccatgatagccgctgccctaacggaggttaagaggctaaaagtggcacatttgcatggattgaccaatgatgcaaatgctacaattcctttgagtgtattttggctagttccgcaattcttgctagtgggggcaggtgaagcatttacatatattggccaacttgattttttcttaagggaatgtccaaaaggaatgaagacaatgagtacagggctgtttttgagtacacttgcattggggtttttctttagttcaattttggttacaattgtgcatgttgtgactgggacaacaaatccatggctagctgataatttgaaccaagggaggttatatgatttctattggcttttggctatattgagtgtgttgaatttgatgtttttcttgtacttttcaagaaaatatgtgtacaaggagaagagacttgctgaaatggggattgaattggaagatgatggaccggtttgtcat

SEQ ID NO: 152 - DNA, 1017 bp, Nicotiana tabacum
atggcacttcctgaaacacagcaagattcaaaagctttaccagatgcttgggattacaaaggaagaccagctcttagatcctcctctggtggttgggctagtggtgcaatgattttaggtgttgaagctgtggagaggctaacaacactagggattgctgtaaatttggtgacatatttgactggaactatgcatttagggaatgctactgcagccaacaatgttaccaattttcttggaacttctttcatgctcactttatttggtggttttgttgctgacacttttctcggaaggtatcttacaattggtatctttgccactgttcaagcaatgggtgttacaatcttgaccatttccaccataatcccaagcctacggccaccaaaatgcgaacaagttggtagctcatcatgcatccccgcaaatagcaaacaacttatggtcctatacattgccctatacatgacggcgctcggcaccggcggcctaaaatcgagcgtctccggctttggcaccgaccaattcgacgatgctgacaaaaaagaaaaaggtcaaatgataaaattcttcgattggttctttttctttattaatgtaggctcgctcggtgctgttacagtattggtgtatattcaagataatttgggaagagaatggggttatggaatatgtgcatgtgctattgtaattggacttgttgtgttcttatctgggacaagaaaatataggttcaagaaacttgtggggagtccattgacacaaattgcttcagttattgtggctgcttggaaaaaaagacatttggaattactttcagattcttcacttctctttgaaattgatgatatttttggtgaaggaaataaaaaaaacaagcaaaagttgcctcatagcaaggaataccgattcttggacaaggcagcaattaaggaagatcatgatcttgaatctaatggcactaacgttgtaatcaacaagtggaaattagcaaccttaaccgatgttgaagagtaa

SEQ ID NO: 153 - protein, 338 aa, Nicotiana tabacum
MALPETQQDSKALPDAWDYKGRPALRSSSGGWASGAMILGVEAVERLTTLGIAVNLVTYLTGTMHLGNATAANNVTNFLGTSFMLTLFGGFVADTFLGRYLTIGIFATVQAMGVTILTISTIIPSLRPPKCEQVGSSSCIPANSKQLMVLYIALYMTALGTGGLKSSVSGFGTDQFDDADKKEKGQMIKFFDWFFFFINVGSLGAVTVLVYIQDNLGREWGYGICACAIVIGLVVFLSGTRKYRFKKLVGSPLTQIASVIVAAWKKRHLELLSDSSLLFEIDDIFGEGNKKNKQKLPHSKEYRFLDKAAIKEDHDLESNGTNVVINKWKLATLTDVEE

SEQ ID NO: 154 - DNA, 7728 bp, Nicotiana tabacum
actgttttcgtgtgtttcctctctgttttctcatttctgtacgttccttgaggaggcttctctctctctctctaacacatcctcctcctctcggaacttcattcactctctctttctctgtctacattttctctctctacagccatgtcttccgataacttcaccgacaaaaacgccgtttttcgcaagctcaaggccaagcccgacaacaaggtttaaatcttaattcatcgatttttttgttcggtttgatcgaaaagctatcttatttgaatttttatctatttttttcgtttgaatcgattgaaaattgtgagatctgatttagatctagtgtttttgctgagtaaattgtagtttctgagcgatctaagtcggcttttgcttttttgtttgtttgaattttatcagatgtgttttgattgcaatgcgaagaatcctacgtgggcgtcggttacgtatgggatcttcttgtgtattgattgttcggcgacacatcgtagccttggtgttcacatcagttttgttaggtatgttttaaagtttgattttttactcttatttttgtttttggattcgtgagctgatttttagctagataattttttttcatggtgacatatgagtggattttgttcggaggagttgtataaggcatgctttttaggttttataaaaatatagaaaaaatgattagaaatgttgaaatcaatagaatcaacaggttagaagccgtgacttctgccttataaaaaagtggctgatttaaaatgtggactgaggtacgtgtagacaatattttaagagttgtcttgaatttaggagttatcttgttctgttaaaatttcagtgtctaaggtacgttcggacccgctgtcttgagcatgggcagatgtacagttcgcggcagaagctgagccaggatttgaaatttatgggttcagtattctgatgactgaaatctaaattagcaatttatacataattcaataattttttaagacaaatgaagggtttggtcaaaagttaccgggttcaaccaaacccgtagccgaagggctagctccgtccctggttcgggtacgggattggtaagaactcagaagttttggcccaagccatgtatgtttcctaagaaatccacttaatatgaataaattattaatttagaacccattaactcaaaatggcctaaaccccacacctttaaacttcaaatcatggatccgcctatggtcttgtcaagttatatgttgttgaaatttatttatatatgtagttataataggagtagtggggtgcaatggtattctacttgattctaaatcctgaattcgtctaatagattctataatatgaaaagaattaagctaatgatgaaagcatcttaaagatctaatcatctggcatggtcctaggctctaaactcctcctaattgtagaatatgtggacgttgagcggccattgggctagatgcagtgaaatccattggtttctcaactatcttgctttgttttctctccttgatgtgtggcttttggggttacacgtggtcagagtttttggtggtggttgatagatatgttttcctcccgttgctcaatattgcaattacatgagcatgtatcaaaagattgcatcttttgattaatatgtgtcggacaatcttgattatgaattgagcttaggacattaatcttgtgctccgtattcgattgccattgaagcaaaccataaattttgaactggaaatggtcaacacacatgatttccttttatggcggatattggtgcgcatacccctttcttctatgaaagagaactgatatatgacctcttcgaagctgccactgggatgcgaatatggacgatgtagtatgaatcccatatgtgtttcttatacaataccaaccgcagtttctggttcgaaaccattatcttcatttaagtttgccggtttagtggataagaggaaccttaacctcaagaaaaactgagggagaatgaatggtgttatgttagcagcatttaaaggtaatattagcaaatcttcacattgaagttgattcactcaccaattagtgtccggggaatggttcttgcagattggttaaaattcagataatgatactgaagaaggaaaaagtaacatagtaggtcactgtggatgtctattccactttgcataatcttggtttattgcaaaagagagaaacaatagatggtttgaatatagaagaaagacaggttagcaactgaaatgcgtagttttcagcttttgtattgttgaagtaagactaatgtcatatacgccatagatgaagtgttggactatttgagctgcctgcatagttaaggatgctgtgtttctctatatatccttgtaccatgcactatcttagtgtttttaataataaaataccttgccttttaaaacataaagggtcctgttgtcatctctgttttacattgtgccacaacaacttcattttgcccaacaattggtatgaccaccttaagagacttcatgtgtttgctccaagggctttagtttagtgttaagagcgcgatgtttgatgtgtggattaggtgcatgccacatgtttgaatcccgtagcggacaaaagcttggtgtttaagtggagaaggatagaaggtgacccctttatctaccgagttccgaaccgtgcgccattggcactcgggaatttttgattattagagaaagagagatttttcttgcttgcagtgccctacctatcatggttaacaaaaccgacaaagtgagccatcataatctggctacttttattcttaacacattttcttccttctcattgaaaaacccatattctttctttggaggaggatgtgaatgaagccttctcttttcatccacgactagtttttcacactttttccgataacggtggtgtcggggccagtttgcacgcacctcaattattccaccgggtacctgcttacgtcccactagcacatgtaccgggtggactctgcctaccaaggcttggacatatgtgaagaaatcacctattgtttttttggctttactaggatttgaatatgagacctcatgattctcttctcacttcattgaccactaggccacacccttgggtgcatgctagttcttcatattatatattgtcactgctatttttttcaaatgacactgccaatgcgatgaatctaagagaggaagaatagaaaagtaagccgaggaagaatagaaaaggaaaagttctaaatggccgtgtcggacttcttggctgacctgcgttatttttataacaaccggcctgaccactgcatcacactttgggcctcgtcagttcgttgatgctaatctcacctcaccatggtagctggaccttcctacctctaacgatcagcacgtcagaatattagtcaagcggagacaataagagcattttattaccttatgaaaaaggtgatgacaacaatggcatggttagtgattaatctagacattgttaaacctaacctgatcatttgattgattatgagaacaattggccatcggagattatggaaggccatgaaggctagatttgaggtatttttgctgtctgtgtgcttgcttcaaaagagaaaggggggagggggggttgaacgttagagaaagggaggggtgataatattgctttgcatttcctttatcatgattgagatgttcattatgggccaagagttatcttctgacccacccccttttcttttgtaatgttttgaggtgggaatgggtatggccaaccggaaacaaataaattctgcattttctttgttattttggcattactaactgtcagttctctgatgaattgattcttgcagatcaacaaatttagattcatggtctccagagcagttaaagatgatgtactttggtggaaacaaccgtgctcaagtttttttcaagcagcacggatggacagatggaggcaaggttgaagccaagtatacctccagggctgcggaattgtataagcaattactatcaaaagaagttgctaaaagtaaagcggaggatgcaggtttgccagcatcacctgttgcctctcagggtgtgcagagtacgaatggattttttgaagttaagactagtgaagctccaaaagaaacctcatcatttaaggaagaaactcctgcttcgcccaaagcatcacagtcggttgttactacttcaattaggaaacctataggtgcaaagaaatctgggaagccaggtggtggacttggagctcggaaacttactaaaaaggtattcttagtcttatgagctagagaaatggttgcagggtataggttgcatattctgaaatgaagaattatatgtgcagtttagagtaagctgtttaacaaatttgctccaccaatttggagtttattaattgattaagcatcttttaccaatgtacagccaagtgaaagtctctacgaccagaagcctgaagaaccgcctgttcaagtttcttcctccaattctacaagtgatgcatcaactattggttcatcattcgcatctcgcttcgagtacacagacaatgttcaacccgctgagatgagttctggaggccctcgtgttcttaaccatgtatcccctccaatgtcctccagctttttttcggactacggaatggacagtggtttcacaaagaagacaagttcaaatacgtcaaaagttcaagtgagtttgtattctagttttgttttcaatcatatgaggattctaatgaactgttacagtgaaactttaatgttgacatgattatatgtgagatataaagaaagtgatgtcggacttggttagaaggtaaagatataagcttcatttttcaccttgatatccccaggaatactagttccgtggtacggctatacttttttcacatcctattacctatttatacttctacatttgatctatctgaagcaggcttgagtttttctgaacctgcataagtgctatccaagataagcatttaatgtatacaaataacaaaaagggcagcttgttgcactaagcccctgctatgtgggtccgggaagggtcgaaccacattgtgtctgatgtatgtagccttaccttgcatttatacaaaaagctgtttccacggcttgaacccgtgacctcgtggtcatggcagcaacttttattgttgcgcgaaggtttcccttccattgagcttctgaaagattgggggcagtgatttgtgaaagatttattgctttataatcctattccagtatcctgcgctgcgaacaagtacgaggattgttactgaattgaaaaaaaaattgttgcccttggaacttcggatgcttctcgacagtctatttgcttttctttttttctttttaaatggaactacccattagcactcttgaaatacttattgccccactcccttccccactgaagaaacattttcagtaggttaacccaaatcgctagtgtgtctctacctttttagtcattctagaaaaagtaaatgttcatcctaaacattaccagtgcaagtgcaagtttcaagtgtctgttactaataaaaaagaaaaagaaacaactttccgatgttttctttgaaatctaggttgcctggaatattcttcgcttttttctaaacctcatttgtgttggatttgtccttttatctgtgatttactgctctcactcagttcttttgctcctgatagatgagttgaccgctttgcctaagttatttctgtagtcttcaagtattcttttctctcttctcctttatcatcttcactggcagtgtttatttcactgtaactcacatcctattttaatcagattgaggaaactgatgaagcaaggaagaagttttctaatgcaaaagcaatttcttctgcccaattctttggtgataagagcaaagctgaaatggaagcctcagtttctctgcagaaattctcggtatgcttgcttatagtagctaacattctcatatatttaggggccttgctggtttttcagtcagcatggaaacaatgaaaacccctcccttccctcattcattatgatagttagggtctttgtcctactaattagaaataactattatcgcaacaacaatatgccccatgttctccttttttcttcccattcccttttgtcctttaatgcaccgtactttttcacatgctatcattttgctgggaatttgtggtaacttaaaaagagacttgtctatatttttcattaatgtggtgttcatgctttcctgagccgagggtctattgaaaacaacctctctatcctcacaaggtaggggtaaggtctgcgtacacactgccctccccagatcccatgttgtgggataatactgggtatgttgttgttaaaaagagactgtttaacggttactgtgagggccttctacaatggaacttattaattaccagtacttgggttgcagaaccacatttatctgtatgttgaagataccttattgatgttgtttactgattgagggatatatgatggataattcttgaaattccatttatggagataatggtgaaacaccatttgccataacttgagataatggtgtcttgctgacctcttgcttgttcgcttcataattgcttatgttcatttgcataacaagttatctaaatactgctggtccaatgtaatgtggaatagttaaccccctcaggtctttttaatacttgaatctcatttagaagtagcttgtaatagctacttcagcaaatgaatatgatctgtaagctaaaatgatctgcacagcttatagcattagtcctaatctgattatttacttgttacatttgcctgtcgggttgcttccgctagcgcttattgtatatttacttcgtcaaaaaaaaaacttgtgcttattgtgtattttgtctgactcacgtctgaagaatccttttagtgtcaatttctaaacgagttcaactatattacttgagcttgacctgaaaaaagataagttcgcctaaaaatgtatgagtcagactcgtgcacctaaaaatgtgttctgctatctattcctcagggttcaagtgccatttctagtgcagacctttttggtaacgatgatagagcagatctggacctcactgctggtgatctcattaaccgactctctttccaggtatagaagcaataataacacaaacgtaaacgcttttcaattcccataagcaagttttgaacggaatgctctttcgtttgtctctctgttttcaggcacaacaggacatctcctctctgaaaaatattgctggagaaactggaaagaaacttggctccttggcagcaaccttaatgtccgactttcaagacagaatcctgtgaggaagtcaccttgggtttaaagtcgtgaagagggaggttacgggatttgtatgaaattttttcagaaagtgaaaataagagtagacctcataggtttttgaggaagctggtcttgtcttattaaaaatttccttatgtatgtttttctttttctttatttagttcttgacgaggttcgtagagctttgttaaacattttactgtgtactagactgcgtccgagttgtgaaatcagcgaattgtaaactagtgaaaactatttctcaatgtgttcaattaattatagggtatgattttattctctttatcgacctggcatatttagtcg

SEQ ID NO: 155 - DNA, 1212 bp, Nicotiana tabacum
atgtcttccgataacttcaccgacaaaaacgccgtttttcgcaagctcaaggccaagcccgacaacaagatgtgttttgattgcaatgcgaagaatcctacgtgggcgtcggttacgtatgggatcttcttgtgtattgattgttcggcgacacatcgtagccttggtgttcacatcagttttgttagatcaacaaatttagattcatggtctccagagcagttaaagatgatgtactttggtggaaacaaccgtgctcaagtttttttcaagcagcacggatggacagatggaggcaaggttgaagccaagtatacctccagggctgcggaattgtataagcaattactatcaaaagaagttgctaaaagtaaagcggaggatgcaggtttgccagcatcacctgttgcctctcagggtgtgcagagtacgaatggattttttgaagttaagactagtgaagctccaaaagaaacctcatcatttaaggaagaaactcctgcttcgcccaaagcatcacagtcggttgttactacttcaattaggaaacctataggtgcaaagaaatctgggaagccaggtggtggacttggagctcggaaacttactaaaaagccaagtgaaagtctctacgaccagaagcctgaagaaccgcctgttcaagtttcttcctccaattctacaagtgatgcatcaactattggttcatcattcgcatctcgcttcgagtacacagacaatgttcaacccgctgagatgagttctggaggccctcgtgttcttaaccatgtatcccctccaatgtcctccagctttttttcggactacggaatggacagtggtttcacaaagaagacaagttcaaatacgtcaaaagttcaaattgaggaaactgatgaagcaaggaagaagttttctaatgcaaaagcaatttcttctgcccaattctttggtgataagagcaaagctgaaatggaagcctcagtttctctgcagaaattctcgggttcaagtgccatttctagtgcagacctttttggtaacgatgatagagcagatctggacctcactgctggtgatctcattaaccgactctctttccaggcacaacaggacatctcctctctgaaaaatattgctggagaaactggaaagaaacttggctccttggcagcaaccttaatgtccgactttcaagacagaatcctgtga

SEQ ID NO: 156 - protein, 403 aa, Nicotiana tabacum
MSSDNFTDKNAVFRKLKAKPDNKMCFDCNAKNPTWASVTYGIFLCIDCSATHRSLGVHISFVRSTNLDSWSPEQLKMMYFGGNNRAQVFFKQHGWTDGGKVEAKYTSRAAELYKQLLSKEVAKSKAEDAGLPASPVASQGVQSTNGFFEVKTSEAPKETSSFKEETPASPKASQSVVTTSIRKPIGAKKSGKPGGGLGARKLTKKPSESLYDQKPEEPPVQVSSSNSTSDASTIGSSFASRFEYTDNVQPAEMSSGGPRVLNHVSPPMSSSFFSDYGMDSGFTKKTSSNTSKVQIEETDEARKKFSNAKAISSAQFFGDKSKAEMEASVSLQKFSGSSAISSADLFGNDDRADLDLTAGDLINRLSFQAQQDISSLKNIAGETGKKLGSLAATLMSDFQDRIL

SEQ ID NO: 157 - DNA, 8051 bp, Nicotiana tabacum
gttctactttccctcccttttcaaaaccctccaattatcaaatccacttcaatttccctccattcttcaaatccataactaccaaatttgtctttccctttcatagattacaacaatctaagttcaaatcgcatctcaaatcttcaaaaaaacctaccttcaaaacccaatttttgattacttttcccccaaaaaacccttttctctccgttttttcaacatttcaaaggacacccatttcgtaaaaaagcctaaagattcattctctaccattaaatttagttgattttcaccaaatcttaactgggtcatccccaatcatacccttcaaaaaccctagtttttaaccccaaaatttcaagaaaatcctatctttttatctgttggtttgacatttcaatggaaacccatctcgtggagaacctaaaaactcaacctttacctgttaattcagttgagtttcaaaaaaccctagatgggtcgtccccaaattcgccgaatcaagctcagcaaagtgatgaaatggaaaaagatggtgacgttttggcagaagaagattccagaagagttgagaatgtgaaggaagagaatttggatttggattctaattgggctgattcttgggccaaagttactgattcaagcccattggactcacaatggtctgttgatgctgctgattatgggccttcgtcttctaattgggctgaatgcccttcagaaataaagccattggactcaattgggcccgagtggaattttcaaagagatgaggaaactaagcctgaaatctctgatttaccctttgagaatcagccttctaagctggtaagaactttgtcaattggtcagtttacacacacaaacacatattatttaagttaattcttctatagttataatacttattttttttttaatttatgtaaatttatttgatttagtacatagattaagaaagaaagggctcttgaaacatgccataacatttatgtggttactaatcttggtgtatgcgcgttgcgcgtgtatccatatctcattgagtaatttttttaaaaaaatcgcttaaatattctattaatttaagttaagttatataataaacatgtaagtttataaaatgatgaatattgatcctaaacttagtaatgaagaactcaccccataaaactacttaatcattagtttaaaagttgtaaactttttagtatttagttatatgcaaatcctatgatgagattataacgtatcaatgacgtagttttaggatgtgcgcgctctgcgtgcacttattctcaatgagtataaaatcaaatcacaaatattattaaactatgtaatttagttataaatactagattttaaaaatgcacaagcccttgaaaataattaatattgatcatatttagccaacttaagaaagtaaaaagctatgtcacacaaaagtatttaatgcattattataacttcaatatatgagttgtgcatttgttttagtagctcagacaacgtagaataatatgttgacttatacctattatcatgcaacaatacaatgttcttcatgatcttaaaaaataaattctattttatcaagtacctaatatgaatttcatcttattcatattggaactcaaataaaaatatacaaaaaacattagtagacccaagttgttacttttagttagaatacggagaatttattggctgggtattatttaagcccaactatttgtttctagaaaaaataaaatgatcgttaggaagggtaagggataaattaatgcttattattgtttatccaacgcgaagtgtacaatgtgatataactctccaaaggtataaaaatgtttcatgtagatttgaagtgtattcatataatcattacaatagtgtttaaactatatatttttcaacataaacattttaagttttttgttgatttataaaatagaagtatagttaagtaattagatttattcgttagtaacattttagtgaaacactactcgagtccaactgatttgatgttatctcactttattttcgaataatgttgttgatatattctcttttatcatttgaatgactttgtaacgaaaaaaatcttactgtgaatgcgatatttatcactaatttcaaccaattgctcgtactcataattaataagcattataaatcacctaacattaaaggaaatgatttaataaggaacacaaaattttgttgattaaaaaatcataaaatattatgaaaataagaaaatgactcggttattcttatcgtttatcacatttgaatattcagctttgttcagctcttgattagtatgtaaacataactcgcgacactcaagttatttataatctaaaaatactttaaacacttatacatacaagtcatatcattaaaaattcttaattttcatgtaataatatattcctgtattttcctgtgaaaatacaacgcaaataaaatacatgacatttgaacgataatccagtttagttttgctaagtggttgagttttctattctcatttctccataaatatagttttgtcatttgttctaattattggatttagatttaaattattatccaacaattgagaaataaaaaatattttaataggaaagtaattctaatttaatataaaaatatgatatagttcatatatataggccaaaggttatactgggtatgttgttgtatataggccaaaggtaaaatagaaggagttaaacacataagtgccacaatacattcctcgcaagtgccgcaatacattcctcataatctgattaaacaaatgtgattcaaaaagatatttaaacgtcgaaactaatgatagaacaaattatagataaaattaagtttgtcgcttctattttacccaattctacggaagaatctcttagcaaaatatgccatacttgactaacatcataaatttttcttgattttattgtacggtgataataaagtcttgatcaattttagtcctatattaggactttttacatagttcaaataagaaatactttaataactaaaattttaggtgattttaaattttttgaatatcaggaaactaattaaattacagttttatccaatataatgttttttaaagaaaagaaaaacagaatttatattggataaaattataatttaattatttttctaatatttagggcttacattttaaaggataaaaaagtgaatgatattttgctaagagactttgtacatataagataatattgatatagatataagcttctcattaaggataaaatgtgaagtctaaattaaattatttttgaatctagaaaggtgtcatggactaaaaaagaaatagattgaaacggagggagtatttattaagataaattaggcattgctatatttgtatgacatttatataaaactcattatagttattttgttttgttcatgcctattttattccaatactaaatagtttgtcttttaaggcaaattagtggttcttgtatgtataaaacatttcaatcaattaacacattatcaaactagttggttcggctgtatgaattcttttcatcattccacttagtccagtcttatttttattccaatactaaatacttatgtctattcaggatcatgtgtatgccattagttcaaataaaatctcatttttgctcctatgaactcacttgtttttttcttctccttttgttattggctgttattagggtgctggacttgctaacttaggcaacacatgctttctaaatgcggttttgcaatctttcatgcacacagtgcctttgcttcagcaccttacgtcgaatgatcatgtatcaccatgtgatagtaaggattaacacagaatttgcctttgttttaagttgctttgagttatttcagtgtatttgattaaaaaaatttcttctttttggagtggctttttctttgaatttattatcaatgctgattatccttgcttgtttatgtatactggttgcaggttaccttagaggattctgcgtactttgcgctattagggagcttgttgacctttcattggcttctgggggtgatgttgtctcgccgtggaaacttgttaacaatttgaaccgtatcctttttcttgtcttgtttgtgagttaataaaatattcccttctagcactcagggtcggagctagaagttcgtggtcgggttcggccgaatgtaatagcttttgctcaaccaatgtatttgcgttaagaaactcattacatatgtaaaattattaaattttgaaccaattattaatacttgaagtcgtcattctaaattccagaacctataaagttgaaatcctagctccacctgtgctagcaaatgcatatgtatagtatatcaatttcactgcttagatgttttctactctgatgttttttgttatgttatttcattgtgcttgtgcatgccttccaatttcttccaagagctatgctctttaccagattataagaaatttggcttgacttttgttatagtactgtagactatgatacattcaagtttctttcttttctgtttttactataattgaaaaggccggcttgtgtgcttcatgcctttgagccaatgttgtacctagtatttctttgtagtccttaactttgtgaaaatatcagatttttcatccagttttcataggttccaacaagaagacgctcatgaattcctccaatgttttctggatagacttgaaagctgctgtaatgattcagggccaaaagacagggcaccatcagaaagtgacaacattgtgaagcaggcctttggtggtcgccttgtcagcaaagtaagcatacaagagtactatcttattcttttttttaattgctttgaacataaaatgaatagattaaataggttttcatatatttaaattgcatctgcatgcagtggcatacactggaatttttgtaagcagtgaatattttaaaaagcaaacaaatgaataaatcactgtaatggcaagcagtgtcatttgttatatttatatccaatattttatttttatttattatttatagatacaatagacccttatggtccggccgttccccggaccccgagcatagcgggagcttagtgcaccgggctgccaatttatagatacatattacgaaaaaatatcgacgaagcggtgtcatgtgcctacacccctgtttgcatgtgtgttctctgggtatttagcttgcaaatatggaattaatattgtttatatgtctttcttaaactgcagctgcgctgttgcaattgtggtcactgctccgacacttatgagcctctaattgatctaagtttggagattaaggatgttgacagtttacccgaagctttggagtctttcacaaaagttgagaaaattgatgatccagagataaagttttcatgtgaaaaatgtaaggaacaagtgtcaatcgagaagcagcttgtgctcgataaagccccttctgtcgccgccttccatttgaagagatttgaaaatgatggttcttttgttgagaaggttgacaagcatgtttcatttccactggaattggacttgcttccttatactgataacaaccaaattaataatgtgagtatttgttgcttatgtgaatctatacttgaagttagttttcatgtgaaaaacgttgcatttggacttttcatgcatttcctttttttaccaattttcttcccttcactttaccttatgtgagaagaaacatgatgttatttaattttcccttttctcaacagggagaaatgaagtacgatctttatgcagttatagtgcatagcgggttttcatcctgttcagggcattattacagcttcattcgttctgcaccagatgaatggtacaaatttgatgactcagaggtaaatacaacaacaacccagtataatcccactagtggggtctggggagggtagtgtgtacgtagaccttacccctatcatgggtagagagactgtttccaaatagaccctcggcatccttccctccaaaaactccccaccttgctcttggggtgactcgaactcacaacctctttgttggaagtggaggttgcttaccatcagagcaacccctcttgtccatcagaggtaaatagcatactggaaaaaaatgctctctactgtatgtggcttagcgtaggactaatccgtagattgtgtaaaatttctgaatatttatggggacgactaattcatagatttttagtgtaggactaatccgtagattgtgtaaaatttctgaatatttatgggggacgactaatgcatagatttttagcgtaggactaatccatagaagcatttacgacaactaacttgatatttttatttgattgtcataggtatttcgggttcaagaagatcttgttttggaagaggaggcatatattatgttctatgcaaagagaggcactccgtggttttcagattttgtcgaaatgaaaaagtccttcatagatccgtccatatttaatacttctcccaagtcagttctagataatgtggatgctatctccatagcttctccgcgcatgccaaatgatcttgcttgcaatgtcagtgaatccaataatgctgcagatgaagcatctcctaaacctgacctcgaaaagattgaggatagtgaatcaaagtatactgagcagacgtctactccaggactatctggtgcgatgaaatctctgtattctcatgtagatgaagtgtttttaccttcaacgcatgaagaaaactgtactcgggacataggtgtgaccaaaagaagtgtaactcttactcccaagacactgtctagatcgccaagtccagagatataccgagatgatcccccaggtaaactcatcttctacttttaggagtcgtttggttgattgtattagcataattaatcttggcataaaatcggcattaactaatgtgttgtttaattggctgcataagaaaaaatataattgacatataactagtgctatatttggttggtcgcatgagaaaaagtaattgccgcatatctaatgcagcattttcttggtgttgataagtaaattacattaaattatgcgagaatctatgtattattttatgtgagaaagaatgtggaataaaagtatgtgtattagcatttagtactccggcttttgattatttgaagccaaaaatgcctttaaaataagtaaatctgatataacaattctttcattttgttttatagtcccggcataactagtatgtgagccaaacggcccttatttatttgagagtccatgccattgccttactaaatggaaaaagcatagtgctaaataactggtttttatttgcagaaaacacttacgccattcctcgtggccatctagcattagcagatccggtttctttcaaaaaccaatctcagaaggatcacgagcaggacttggaaagaaaacaggcgtgttctctgattaagaagcgaattccagggtcaagaggtcaacaattaatggctgctatgcgtggctcgcgtagtgaaggttccgtgaacaagaaaaggagaaaattggaagtagtttctccaagtagagacgatacaggttcagctggtcgccgtaggtccagctttggctctatgttacatcctgtaacggcgggcagttcgagatgactaggttttgattttgcaaacacttgttgtttgtacctctcttttgttgtaactggaaaatctgaactgaaagaatagtctttttgatttagaactacaggggtagtgtatcttaaactggctagggtaaaacaggcagctcggtgcactaagcctctgctatgagcggagtccggagaagagccggactacacgtgtctattgaactggctaaggtagttttcggatattcagctgtttagtttgttatttaacaatgtatagtagagactacagagtgagaattcatgttattttctgagagttcagaagataacatacatataatgaaggattaggattttgt

SEQ ID NO: 158 - DNA, 2124 bp, Nicotiana tabacum
atggaaacccatctcgtggagaacctaaaaactcaacctttacctgttaattcagttgagtttcaaaaaaccctagatgggtcgtccccaaattcgccgaatcaagctcagcaaagtgatgaaatggaaaaagatggtgacgttttggcagaagaagattccagaagagttgagaatgtgaaggaagagaatttggatttggattctaattgggctgattcttgggccaaagttactgattcaagcccattggactcacaatggtctgttgatgctgctgattatgggccttcgtcttctaattgggctgaatgcccttcagaaataaagccattggactcaattgggcccgagtggaattttcaaagagatgaggaaactaagcctgaaatctctgatttaccctttgagaatcagccttctaagctgggtgctggacttgctaacttaggcaacacatgctttctaaatgcggttttgcaatctttcatgcacacagtgcctttgcttcagcaccttacgtcgaatgatcatgtatcaccatgtgatagttaccttagaggattctgcgtactttgcgctattagggagcttgttgacctttcattggcttctgggggtgatgttgtctcgccgtggaaacttgttaacaatttgaacctccttaactttgtgaaaatatcagatttttcatccagttttcataggttccaacaagaagacgctcatgaattcctccaatgttttctggatagacttgaaagctgctgtaatgattcagggccaaaagacagggcaccatcagaaagtgacaacattgtgaagcaggcctttggtggtcgccttgtcagcaaactgcgctgttgcaattgtggtcactgctccgacacttatgagcctctaattgatctaagtttggagattaaggatgttgacagtttacccgaagctttggagtctttcacaaaagttgagaaaattgatgatccagagataaagttttcatgtgaaaaatgtaaggaacaagtgtcaatcgagaagcagcttgtgctcgataaagccccttctgtcgccgccttccatttgaagagatttgaaaatgatggttcttttgttgagaaggttgacaagcatgtttcatttccactggaattggacttgcttccttatactgataacaaccaaattaataatggagaaatgaagtacgatctttatgcagttatagtgcatagcgggttttcatcctgttcagggcattattacagcttcattcgttctgcaccagatgaatggtacaaatttgatgactcagaggtatttcgggttcaagaagatcttgttttggaagaggaggcatatattatgttctatgcaaagagaggcactccgtggttttcagattttgtcgaaatgaaaaagtccttcatagatccgtccatatttaatacttctcccaagtcagttctagataatgtggatgctatctccatagcttctccgcgcatgccaaatgatcttgcttgcaatgtcagtgaatccaataatgctgcagatgaagcatctcctaaacctgacctcgaaaagattgaggatagtgaatcaaagtatactgagcagacgtctactccaggactatctggtgcgatgaaatctctgtattctcatgtagatgaagtgtttttaccttcaacgcatgaagaaaactgtactcgggacataggtgtgaccaaaagaagtgtaactcttactcccaagacactgtctagatcgccaagtccagagatataccgagatgatcccccagaaaacacttacgccattcctcgtggccatctagcattagcagatccggtttctttcaaaaaccaatctcagaaggatcacgagcaggacttggaaagaaaacaggcgtgttctctgattaagaagcgaattccagggtcaagaggtcaacaattaatggctgctatgcgtggctcgcgtagtgaaggttccgtgaacaagaaaaggagaaaattggaagtagtttctccaagtagagacgatacaggttcagctggtcgccgtaggtccagctttggctctatgttacatcctgtaacggcgggcagttcgagatga

SEQ ID NO: 159 - protein, 707 aa, Nicotiana tabacum
METHLVENLKTQPLPVNSVEFQKTLDGSSPNSPNQAQQSDEMEKDGDVLAEEDSRRVENVKEENLDLDSNWADSWAKVTDSSPLDSQWSVDAADYGPSSSNWAECPSEIKPLDSIGPEWNFQRDEETKPEISDLPFENQPSKLGAGLANLGNTCFLNAVLQSFMHTVPLLQHLTSNDHVSPCDSYLRGFCVLCAIRELVDLSLASGGDVVSPWKLVNNLNLLNFVKISDFSSSFHRFQQEDAHEFLQCFLDRLESCCNDSGPKDRAPSESDNIVKQAFGGRLVSKLRCCNCGHCSDTYEPLIDLSLEIKDVDSLPEALESFTKVEKIDDPEIKFSCEKCKEQVSIEKQLVLDKAPSVAAFHLKRFENDGSFVEKVDKHVSFPLELDLLPYTDNNQINNGEMKYDLYAVIVHSGFSSCSGHYYSFIRSAPDEWYKFDDSEVFRVQEDLVLEEEAYIMFYAKRGTPWFSDFVEMKKSFIDPSIFNTSPKSVLDNVDAISIASPRMPNDLACNVSESNNAADEASPKPDLEKIEDSESKYTEQTSTPGLSGAMKSLYSHVDEVFLPSTHEENCTRDIGVTKRSVTLTPKTLSRSPSPEIYRDDPPENTYAIPRGHLALADPVSFKNQSQKDHEQDLERKQACSLIKKRIPGSRGQQLMAAMRGSRSEGSVNKKRRKLEVVSPSRDDTGSAGRRRSSFGSMLHPVTAGSSR

SEQ ID NO: 160 - DNA, 8410 bp, Nicotiana tabacum
attactaccaataattggaaggaggaacagactttctgcttatatactttctgagttatatgagaaacagactcattaatatatccctcttcaagtagattaattctgataaataaaaatgccgatggatgggcggctgtacacagctgctgaaaaaggtgacatgaaagttctggaagaatacaagagtcagttcgccacccaattaactccttacaacaacactgtcctccatattgcagctcaaaataaaggtttaaaatggcaaattaacacaagagattttcttgctatcgccggtccagacttattttccagcttgaactctaatggagatacttttattcatacggctgctaggtggggcaacagagatctcgtcgaggcctttatcaactacatgaaaaattgtggaggggtcgatggggttattgatatagaagctggttctggcattcgaaaaaccagggagttcttgaggattactagcaactacggaaatacggccttgcacgaagctgtaatgcagaggcatgattgtagtgtggtagaattgttggttaaagaagatcctgacttctcacatccgcctaacaatgctcggaagactccactgtatctagctgtggagattaaaaatgaaaaatcagtggaacacatcttgaacaactccacttcaccatcttatgctggtccctatggcacaactgtgctacatgcagctgcaatgtataatactacaggtatctccctttcctcatgactttgcattagttttaccaacattagtaactaacaataggcaaaaagacctttgggatgtccagttggtttggagggtgtcacgatccaaattcccctataggccatgatgacgcccaacgtcgtcgctagacaagccaatagtgaactagacatatatttgttcttttaataatttcaaaatcgttgatttttatttattaagaagatgaaaagtgaaaaagtatagtaaaataaagtgtaaactagtgaaggagcaaatgcagtgaaataaatactcaaacccataaagtgtctactaaaatgttctcaaaatctggtgtcacaagtgtatgagcaactagtataatataagaaacactattctactatccaaaataagataaacagaatgtaaatacaaaagagagactacgaggctacagaacggacttagagagcagctcaccactatgcctcggggtatcgagggtgtgcgcctggatgactgccagttgcacttgcctcagataacagtcttggcatggcaatcaaggacgacatgatatggagacaaccagtccatgccctggatgacctcaaagtcggtcatatcgagcaacagaagatccgctctagtctcacaaccacaaaaattcatgatacaggaccggtaaatatgatctacaacaacataatcgcccactggcatggacacatatactggagtactcagagactcctaaggaacacccagaaaataagcgaacagagatggaacatatgaatacgtagatcctggatcaaatagcactgaagcatccctaccgcagatagaaataatacaggtgatcacggcatctgaggccactacatctggtctggatggaaaagcatagaaccaagctggagcgacacctgattggcctccacctctaggacagcccctacccacctaccctcagcctctgggtggccggacggctggtgcggcagttggtgcggtaactatgggctgatgatcctattgtactgccttgccctgaagcttggggcagaatccactcatatgaccaagattcccacactcaaaacaacctctcggtgcaaaaaatgattgaccctgagtctgactttggggacctgaactcccattggaggaatcctgaatagccgatggacggtaggagctctttagaatggagctgaaatagggccgcactggagcaccccgagaaggtggcggtgatgtataggtgagccttctagactggcccctcataaactgacctctgcccccatacggagcactactgaaccctccagaatatcgaagttgcttgtcccttagcgtctgctctttgacctgctggatgaatacccttgatcctccgaataccatagtgcaaactcgcaatgaacctccacactttttctgcatcaatggggagtatcataagtgcttggcaagacaatttagagaatctcgcctcatagtcgatcacggacatctaatcattctgtagccattcgaactgaccccgtaactcttccctctgaaagaatgggatatgtctctccagaaaaagtcgtgtgaactagtcccaagtcaagggagaagaacctattggcttgttgagaagataggactgccagcatctacgggccctgaccttcatctgaaaggtggtaaagtccaccctgtgggactgtaacgatcaataaagtcctaggagtcttcatgtcgctcacctccaaaggcaggaggatgtagccttgtcaatctatccaatagcttctgcggctcgttgactacagttggtctaggcactagtatagccgctgcaattggttgagctccgcccgcgagtagtgcacctggggtctgatatacggcagctgcatacccgggagactgagcggtaggggtttgtgctccccctccctcctgagatgtggctaggtctgctggaaataaaccagccgtagagtccacaaactgcaggatacgacccacgacctcctggaatcctggtgtggacatgaaattcgttggggccggctctgctgcatgtacctctacctactcctcgacaacaagatcctaccattggatccactggtggcacaactgagcaactctaggacgagttggagccctcccatggcctcagcctcagcctctaatagcagggggagcagctcctccacaatcgggtacatctgtcacgcatgttctcacaatctgtgagagaataagagaaagatacttagcacaacattaactgcacgataggagacgaagaaggagaaagttttctaacaccatatagcctctcgaaaataagtacagacatctctgcatcgatccgcaagactctattaggcctgcttatgacacctacgtgaacctagtgctctgatacaaagttgtcacgacccaacgtcgtcactaggccagccgataattaactagacatgtattagtagttgaaattattaaagcgtaaaactattaagaagatgaaaagtgaaaaattatagtaaagtaaagcgtaaactagtgaaggagcaaatgcaatgaaataaattctcaaacccataaaatgtctgctaaaatgtttccaaaatccgatgtcacaagtgtatgaacatctagtagaatatacaaaacacctatgctactgtccgaaataagatagacagaatgtaaatacaaaagagagactgcagttgttgcagaacggactcaaagagcaactcaccactatgcctcaggctatctcgggtgcgcgccggaatgactgccaaatgtacctacctgccttggatcctgcacgattactgcagaagtgtagcgtgagtacataaacaacatgtacccagtaagtatccagtctaacctcgaagaagtagtgacgaggggtcgacatcgacacttaatatgtgccaataaataaatataatttttttaacaggcatgaaatacatcggtaataataataataacacaataacaatagtaataagtgattttttaattagaagtcaatctaaaatctccgctgacacatactaacttcaacaattatggaccatcaagtaaattataatttctcaagtaggggtgacaatttgagcccaaactcatccaacccgtccaatcacctcagagattaatgggttgagctacaaatatttcagctcatgggtctatttgggatgagcccaagttaactcatcattttttattgcacattctaaccccatgaagtagcccaaatacaactcatgaagctcatccaaaacaaagggatctcaacccaacttaagtcttgtttggaaatttacttaattgtcccatcattagtttatgtatctaaatttaaaaatgagaatcaagatatttaataagctctaatgtaaatatgaataattttgtaattgagttgtggtaaaatttatttatttagaactaatataaaagatatttttcgacttataaattttaagtactaatttgttgtttaagaaaatatattttgattctgaaaatactaataatatttctgtaccttttatagataggtgtataaaaggtaaaagactttgtttatgcgagaagagcatgactctaaaacatgtgtcaagttgggcgggttgagctatgatccattgtttaacctatcttgacccaacccattttagcccaaatacactttggctaggttgggcaatgaccaatttattgacctaactcatcttaacccgctcaaattcagcccaacccgcccatttgccacccatattctcaattcataaaaataatatcaagcgtgatcggattccgaacattatcacgcatgatttatgtgaggtcgtacgacccgatccagaataatgtgtaccctgccgaagatcaaccggtatgaaccacagatgcatctattatactgccgatgcgttcggtccgctctacaagaagagagaatatactacagacatccgatataaaggctatcataagactaattcataaggagacacaatttttatcaacggccaagtaattcgccaaaattcaaattaagtgaagttcggtctttacgaatcctttaacaagtttcaataaaaattaagcagttaaattaacaagtagagtgcaaacaatacaagtattttatgagagggtcctaaaactacccggacataagcacaatttgtagctacgcacgaactctcttcacttcgtgcgtatgtagcacccacaattagaagcaaatagcaatttaaactacctatggggtaaatttcctcttttaaggttaggcaagagacttacctcgtcccaaagctcacttttcggcccacaaattcactctaaagcctcaagttggtgccgaacaatccgaaactagccaaatattatataaattaatcaatacatgctcaagaggtcataatttaactattagagtaattttccaacccaaattagaagattcttaaaattcaccctcggggccacatgcccgaattccggaaattttcgaaggtaaatgttacccataacctcacgaactcaaaaatataatttcttaccaattccatagtaattttcgtggcctaattccattttcatcaaaacctaggttttttaaactaaacccgtgatttctacaatttacatgttaagaatctacccaaaattcgcgtattaaactcacattaagtgggaattacttacctcacgatgataggtgaaaaatccctctccaagagctccaaagtcaacttctctaaatgaaaataggggaaaagagcctaagtccggattaaatggacctcactacctccagcgatttcacatctgcgtcagcttcgccgcttctgcggaacacgcacgatccagcactagttgcacttgcggaaaaattctgcatctgcgagcctgcttccatgcttcctccctccgcatctgcgatccccccatcgcgggaagcgagtctgcttccgcggaagaagcttcgcttctgcggacactagccagtccactttcagtcgctcctgcgctcgttggctcgcacctgcggctcgtcagatgggcggtcatctatatagatttcctgggatctgacgaggcgaatgtgtattgaaatttcctgctcgtactctgtcaaattctagtataatttaagatatcatctcacagagaccggataatttatgctactgacttgtaatactatttaagagaatcaaattgatgaaaagtgattgaggtttaaaacttgttaattacttaaacaaaataaataacttttggaagatttataatttaaaaaagagttgggaatcattgaattcacttgataatattactataataaaatctcaatttcttcatttatttctttaaagaataattgcttatttctaatacaataatattttactcactaagaaataatcaattaataacatttcgtgagaattatgttaattaatcaacttaagactagtgtcgtttaaaccggaatatttttcttgtttgaattgtgctaaaataaagtaataacttcgtgagaatatttttactaaggatcaataatcttgcctatgacaattcctccgtaagaattaaaactgaggcaagcaagattattgacttgaaataatagtttactaaaaagttactctcgctctactattttattcatcagttattatacattaattttgcccatgagaaatacaaaactaatataagaaaatttagagataaaatatgtagacgtgataatagagtaattaaaaaccatcattccagcacagtatgaaatgtaaataaaaagttttcaaatcaagaatatataaaaactgagatagtattataaaatatatcaaactttatcgactatcccaacgaaaagagatcactccattatggagtaagaatagctaaaaaaatatttagccgactagaaatatttaaaatcaagctctggatgttatcatagaggatattgtctttgtagatcaggaagatcagtacaagttctccaacaaggagtatataatttatgtgatccttatttgtatggaattcataaattgttgttagccttggcaaagaggagggatgacatttttcttgagaattgaaatatatatatttggactttctcttttatgatattttatattccatcggtctcaatttattttgctgatgtcaagtcgatattgatattaaacacattggtatgtctacaataaactaaaagaaaaataaaggaaaaagaaagcatagataaagaaattgtttctcttctaaatattctataactatatttttcccccccccccccccccccctccccccactccattttttcacatttttagagtggtgcccttactaaataggatatttcctttggatagaatgcatggaaatgatactaagaaaagaaccaagtctaacaaagcaagtagatgattttgggtggaatcctctccatttcgcggcttacgtagggtttaaactatcagtgaggacattattaatggcggataaacatatggcttatggaactattaaagaagaaaataaaacacctctacatttagcggtcatcaataataaaatacaggccgtggaagagattatagagcagtgtccagattccttggacgcagtcactagccaaggccaaaatgttcttcacattgcatatgcgaaggaacattggaaaatgataacattattcgaagatcaacactggaacaataacatctttgttcaaagagacgctgacgggaatgtgcccgaaaaggttataggaaaaagcgtgtcgtttcagtctcacccttactgggaagaattagatcgcaacaatgtcagatgggtaaatatttgtttattcaagtctcttttttggtcttttcatattaaaaacacttatgagttagtttacaacacaaaaatggcagttttttttaaaccacaattgagatatacttaagatttgagataaaataattagatatttttaactctattttcagaaagaatcttatgagaagtggttcaaaggacgcatggaagtatggaaaaatagagcaaacacacatttgatagttgttacacttatattaacggtttctttcgcggctggcttcacaattcctggtggttacgacggtgatgatggtccaaataaaggcatggcagtcatatccaagaaaacagcgttcaaagcattcgcagtaacagataccattgccatgatatcttccacagctgctgtttttctgcattaccttgcaacttacgaggaagagaacaaaagcttgagtcgttatgtagctgctggcgtccttgccttggttgccatgctagcaatgatgatagcgtttatgactggcttgtatgttgtgctaccttctacaggcctagctgtatttatctgtgtcatttgctctttatcgcttgccctctttatatttgttttaggtaagagtttttatgattcatttcaaaagaaaaggaaaagatattaattactgaaacctaacgagttcttgtcaagaaaatctgtctctttagtttcaagctttttagttgtttgattttttgtgaaagcattatgtctatcttccttgg

SEQ ID NO: 161 - DNA, 1584 bp, Nicotiana tabacum
atgccgatggatgggcggctgtacacagctgctgaaaaaggtgacatgaaagttctggaagaatacaagagtcagttcgccacccaattaactccttacaacaacactgtcctccatattgcagctcaaaataaaggtttaaaatggcaaattaacacaagagattttcttgctatcgccggtccagacttattttccagcttgaactctaatggagatacttttattcatacggctgctaggtggggcaacagagatctcgtcgaggcctttatcaactacatgaaaaattgtggaggggtcgatggggttattgatatagaagctggttctggcattcgaaaaaccagggagttcttgaggattactagcaactacggaaatacggccttgcacgaagctgtaatgcagaggcatgattgtagtgtggtagaattgttggttaaagaagatcctgacttctcacatccgcctaacaatgctcggaagactccactgtatctagctgtggagattaaaaatgaaaaatcagtggaacacatcttgaacaactccacttcaccatcttatgctggtccctatggcacaactgtgctacatgcagctgcaatgtataatactacagaatgcatggaaatgatactaagaaaagaaccaagtctaacaaagcaagtagatgattttgggtggaatcctctccatttcgcggcttacgtagggtttaaactatcagtgaggacattattaatggcggataaacatatggcttatggaactattaaagaagaaaataaaacacctctacatttagcggtcatcaataataaaatacaggccgtggaagagattatagagcagtgtccagattccttggacgcagtcactagccaaggccaaaatgttcttcacattgcatatgcgaaggaacattggaaaatgataacattattcgaagatcaacactggaacaataacatctttgttcaaagagacgctgacgggaatgtgcccgaaaaggttataggaaaaagcgtgtcgtttcagtctcacccttactgggaagaattagatcgcaacaatgtcagatggaaagaatcttatgagaagtggttcaaaggacgcatggaagtatggaaaaatagagcaaacacacatttgatagttgttacacttatattaacggtttctttcgcggctggcttcacaattcctggtggttacgacggtgatgatggtccaaataaaggcatggcagtcatatccaagaaaacagcgttcaaagcattcgcagtaacagataccattgccatgatatcttccacagctgctgtttttctgcattaccttgcaacttacgaggaagagaacaaaagcttgagtcgttatgtagctgctggcgtccttgccttggttgccatgctagcaatgatgatagcgtttatgactggcttgtatgttgtgctaccttctacaggcctagctgtatttatctgtgtcatttgctctttatcgcttgccctctttatatttgttttaggtaagagtttttatgattcatttcaaaagaaaaggaaaagatattaa

SEQ ID NO: 162 - protein, 527 aa, Nicotiana tabacum
MPMDGRLYTAAEKGDMKVLEEYKSQFATQLTPYNNTVLHIAAQNKGLKWQINTRDFLAIAGPDLFSSLNSNGDTFIHTAARWGNRDLVEAFINYMKNCGGVDGVIDIEAGSGIRKTREFLRITSNYGNTALHEAVMQRHDCSVVELLVKEDPDFSHPPNNARKTPLYLAVEIKNEKSVEHILNNSTSPSYAGPYGTTVLHAAAMYNTTECMEMILRKEPSLTKQVDDFGWNPLHFAAYVGFKLSVRTLLMADKHMAYGTIKEENKTPLHLAVINNKIQAVEEIIEQCPDSLDAVTSQGQNVLHIAYAKEHWKMITLFEDQHWNNNIFVQRDADGNVPEKVIGKSVSFQSHPYWEELDRNNVRWKESYEKWFKGRMEVWKNRANTHLIVVTLILTVSFAAGFTIPGGYDGDDGPNKGMAVISKKTAFKAFAVTDTIAMISSTAAVFLHYLATYEEENKSLSRYVAAGVLALVAMLAMMIAFMTGLYVVLPSTGLAVFICVICSLSLALFIFVLGKSFYDSFQKKRKRY

SEQ ID NO: 163 - DNA, 6924 bp, Nicotiana tabacum
ggagaagaagaagctgaagaatctaaaacaacttaaacgacatcgttttgttagtttctcggttcattattagctcccgctaatacacgcttccggtttaaaccggagactttgtgtaaatatggaggtaccggtgctagctcggtgtacgaatactccgacgacgtcgtttatgggatgtaaagtgagtcaatttgattttccgattaggagaaagctaaataagaggaattataaggcgaagttttcagtgttaagagttaaagctatggcggagaggtcgagtagtggtgaggcatcagtggatgctagagagagagaaagtggaggttacacgggaactactatggaggtaacaacatttaatcagagctttagtgatacgcaattgcctgtttgggagaagattggtgctgtcgtcagactcagttatggaatcggtgagttctcaactcgttttgcattttcttaatttttttttttttttttttttttctgtttgagttctggtttcctttttgaagactatttttgggaaaaaagccaaggaatattcatataagttgaatagattcaatgaattcagaattttattttatggcttttggtttcctattctttggtcaaacatttggtatatgaacccactaacccgactaattttgattcgcgtcttaaaatcttactgtggaagatttaagtgttctttacaaagaggacttcattgtcataattcgaacttgaaacttttgattacgatgtaaaagaatttttatcattccaactagggcggttcggtttggatcgatttttccttaaaaagaaaccaaatcaagtaagttggtttttcaaatattagaaccaaaccaaaccaattaagtcggttttttctcgattcggtttatgtcggattttatcggtttttcatgttttttttggttatttgtcggttttttcttaaatataagacatacactaccaaacatatattccggcgaccacattttcaacgtaacactatcaaatcaattgccctttgagaaatttattatttactaaaatatattgatgataattgaatcaaatagtgatgagtaatttaacgactcaatttaaaaaatattttttttaacataaaatggattcttacacttaacaaaagaaaactaccaatcaaactagaatataaaggtaaagaactgtactaaaagtgcaaacaattaacatttaccataaatttttgaaattttctataaaaatatacatatatataggtgtaataataaatttgaaatagctactcctatagtcggtttggttcggtttttttcggttatttttttattaaaatcaaaaccaaaccaaatttgatcggtttttaaaattcaaaaccaaaatcaaaccaaaccaaaccaaaaagtatcgatttttttgatcggtttggttctgatttttcgggtttatgagatagtgaatttacaagtgattcttggaattgcaagtaaagggaaagggtttttgtccttgtcaaaagggaaagggttgttgcatatcttctttttgctttctgtatatgtcattaaagtgcttctaaaagtggaaaagctaaggtttttcttcttcctaacttttaggttttattgttggttggacaacaaatgccaaaaataaatacactgcaataattttgcagtcaatttaatcatttttccaatcacatgttaagtggtactttgtttcctaagtaagaaatataagcaattgtcaggaataggattgtatttatatcctataacaacaataaaatttctccagtggggtctggggagggaggctgtgtccgagagaccctcagctcaagaagacgaaaatagacaataaaatgtatttatatcctactataaataaaattattaatgaaacaattttagataaaattgaatactttcgttgtttttgctcatacttggctattgaggaaaacagaattgtcgttaggcaattgttagtatgcattagaacaagtgtagatgtattttagaatgatagaacatacaaatttatttacttttttaagaacagtataaataaatgaagtgattttaaaattattaagaacatgataatagaagaaaaataggcgaaaattaaaaaaagaataaaagtggagccgaaattgatcattctaatgcatgtgggctaactttgaatagctttaaacttagcaacttattggtaatttttattttatagaaatcttttgttctttctttttcctttttttaataaaccaattttatttgttaactcaactacatgcttctgtagaattacatttagaaaagctttttagtccaaacactaccaaaaagagttaaatgctaaatacaaaataaacaaataataactccatcccgtgccacttaattagaagtagaattgtacttacaggagtaatttgaactttggcaatagttgttaaaatatgttctagcctaactagcagtactaaggtctcaaaatctttgatatcttgattctaatcttcctctaaaaaaaaaaaaaaagaaagtagtccctatgcgcgggtccgaaaagggctattttatgcaaccttaccctgtatatctgcaagaggctgtttctacggtttgaacccgtagcctcgtggtaacaagacaacaatcttcctcaaagaagaatagaatttaatcattatacttgagtaaattgaacattgcaattattatcatagtacatatccccaaaatgtaggatgttgattgtaatactacatattcatttttttcttccaatgtatttattttttatccttacttttttaatacggtgttatcttccactaatatatatcggataactgtgacaccacagataaatatcacctagtgtttttaatcctgtgtatttgtttgtttgttacattgtttattgcatgtatttcttccagccttgtatgagtcccatcccattaaattttttggatatctttagagaagaaaaagaaagaccttcaatcattctctgatgttcagtttgtttttgggatttttacacaaatagccgctcggttttacgtttactttttctagccggtatacataaattatacactgatttaacattattttatatatataatttaagtaactgagtgggctgctatttaggttatttcttctatgtttttttttgaactcaggcatatacggagcaatggctttagcaggaaagtttatatgctcaatgacaggaattgactgcacaggagggttcagtccatcattagatgccattgttgaaggactaggatatgcagctcccccgattatggctcttctatttatactagatgtatgttcaactattcccatttctttcctgccacaaactgtaacagtccagccattggtgatgttatctgcttgtgtggctttaaaacacattactagggtcgtctggaacttgctttcttatatgtcaagcatccctctcgtgttttgtcgatgtgaaatttgcctaagagtgttacaaaaatatatttaacagcattcttggtttacttaacttgcattattttctttcatccacatatggcttcactaactcttagaaaagatgcaacaatgttaaccttatactccctccgttccagtttatgtgaacctatttcctttttggtccgttccaaagagaatggtcctttctaatttagcttaaattttcaattctaccattaatgagaagcttttataaccacacaaatattctggaccccattctgacatgtttaagaccacaaattccaaaagtttttattttttcttaaatttcgtgctcagtcaaacaggttcacataaattgacacggggagtattgcagccattctagctttgtccatctgacattcttggattatataaccgatgttttataataaattgcggtgtttataggatgaagttgtgaagctatcacctcatgctcgagctattagggatgttgaggatgaagagctgcggaatttcttttatggaatgtcaccttggcaggtaaaagatttctcaatttcagcatcaatagttatgtcacaatacagtgaaaggttgatacttaatggattttgatgcaaatttgtagttcattctgattgtggctgctagctctgttggagaggaacttttctaccgtgctgctgtccaggtaagatatatatcatccatatatagcctgcaattatgaattcgttagtccagttgcagccttattttttggatcaataatactccatttcactactttccttcacgtgacttaaactcccacccggtgtcaatattggtaccgtgcttaccctttcatgtgaatcagacatctaacctagtggttggaggtgaaggcagctcaccaactaatcaagcttctctcttcagccatctatgttaaattgtacaaaccttgcatttcctacagttttaactaataatacatactctgaaaaccatttggtgaaattttctgcacttcagttttccaatgtatacatttattttgttaaaagaaataatagagaaagaaagaagaatatagaaaaacgtagaaaccagaaaaaggcttgaggtgtgtagaacactttatcaaaagattggttatctggctcgagggatagtgatcttcgggaatacaaaccacacttatttgaatgtgatgattgttgtcttttgcctgatctaattcactttcggaagagccaactactttcttatttattggaaataatctcaaaaaggttgaaatcttttcagaatagacatatcttttgttaataaccactttcatattacaatctgtccaacaatattatcaacagactaattatttttaacctgtcaaacttaatggaaatgcatggcaaaaaagttatgtttctcataagttatgtgattctttcctccttgctcctctctgattatcttttaattacagggagctttagctgacattttcttaaggggcagtgattttgtgactgatgctagaggaatggcgtcattggtacgtcggattctatttctagacatccttctccaagttaaatatccaaaaaaattccattgctctgacacattctgtttcctcaaaatgtagactggtgttttgccaccttatgtcccgtttgctcaagcatttgcagctgtaattacagcagctctcactggttctttatattatatggcagcctctccaaaaggtcagtttcatagggtgcagtttcaaatccttcgttgtactctgctcgaacatgcttaatcagttggctatttgctgtttcactttcagatcctacctatgttgttgcacccgtgttgaagtcgcattcaggccgtgaagatctaaaaaaactctttgcaggtttgacctctctctttgctcatgacaaaagcaagacagctaccacttgtgatgatttgagtccaagccttgttaacataatgtaataaatctggggattcaggatcaaggcaaatagatatatttctacagctgactgactaaaataagagataaagtctgtcccttagtctagtttatatccacagctgactaaataaaatacaactgttgtgacctgctttgtatcaaaagaaaagcaaagggtttacggctttacacaacaagcaaaacggctttctatcatagttgcaagggccaaacacactcctgatcatcgttctactgcatctggcctgtcctctaggcaccttttatagaaggcagggagcgtgataatatacccgcttcttttgctccattagaccttctcaagctttttcatgtaagaatagctttctaaactattttaaataatatgagaccaccaagcctataggctagactctcctgtcaaaaacaacgtacctacttctcattctaggtgttagcatgtagtgaagactgaagagtccccttttctgtatattgaactatgttgcccgaactctcaaaaaatgtagctaggtgtgcatcggatcatccgtacaggtgcggcagcattttggagagtccatgcgacatagaatattgaagggggttgcttcacaagtgtcaccggagagacggaggagagattggatcaaagaaaaattagtttgagttgagcttattgaggcagaattgattgatacgagtttttttttttttttttggggggggggggggggaagggtaaccaatatcatgaatagttagtagtggaaacgtccagctcatatttttcatgtgtgttaattttatcatctacctgaaatgttttgcagcttggtacgagaggcgacagataaagaagatatactctccgttactagaagccatgttagcgctttaccttgggtttgaatggatacaggtaacatagattttcgttttatttattggtactagtcatcaaaggttgtgtcgacatgaattttatgtcagtatagcttatttgttcttacaaatgcaacagacaaacaatattcttgcacctataatcacacatgggatatactctgctgttattctgggacatggactttggaaaatccacgatcatcggagaagactacatcagagaatccaaacacttaaacaagaaggtaataattcaagaaacttgtaaagtgcctacaatagtgagaatcgaataattagcttgcttgcaggaaccttttgaactgtaatttggagaggtcgtagtattgtataaatctacgtagcatatacgaataatataggtgtatggctcaagtcagttgtatacactaggctagcaaatatacactaatacacacatccacgttatattgtacctcatgtaaattctgaccttatatatgagaaagtcacttctttcttggcttc

SEQ ID NO: 164 - DNA, 1116 bp, Nicotiana tabacum
atggaggtaccggtgctagctcggtgtacgaatactccgacgacgtcgtttatgggatgtaaagtgagtcaatttgattttccgattaggagaaagctaaataagaggaattataaggcgaagttttcagtgttaagagttaaagctatggcggagaggtcgagtagtggtgaggcatcagtggatgctagagagagagaaagtggaggttacacgggaactactatggaggtaacaacatttaatcagagctttagtgatacgcaattgcctgtttgggagaagattggtgctgtcgtcagactcagttatggaatcggcatatacggagcaatggctttagcaggaaagtttatatgctcaatgacaggaattgactgcacaggagggttcagtccatcattagatgccattgttgaaggactaggatatgcagctcccccgattatggctcttctatttatactagatgatgaagttgtgaagctatcacctcatgctcgagctattagggatgttgaggatgaagagctgcggaatttcttttatggaatgtcaccttggcagttcattctgattgtggctgctagctctgttggagaggaacttttctaccgtgctgctgtccagggagctttagctgacattttcttaaggggcagtgattttgtgactgatgctagaggaatggcgtcattgactggtgttttgccaccttatgtcccgtttgctcaagcatttgcagctgtaattacagcagctctcactggttctttatattatatggcagcctctccaaaagatcctacctatgttgttgcacccgtgttgaagtcgcattcaggccgtgaagatctaaaaaaactctttgcagcttggtacgagaggcgacagataaagaagatatactctccgttactagaagccatgttagcgctttaccttgggtttgaatggatacagacaaacaatattcttgcacctataatcacacatgggatatactctgctgttattctgggacatggactttggaaaatccacgatcatcggagaagactacatcagagaatccaaacacttaaacaagaaggtaataattcaagaaacttgtaa

SEQ ID NO: 165 - protein, 371 aa, Nicotiana tabacum
MEVPVLARCTNTPTTSFMGCKVSQFDFPIRRKLNKRNYKAKFSVLRVKAMAERSSSGEASVDARERESGGYTGTTMEVTTFNQSFSDTQLPVWEKIGAVVRLSYGIGIYGAMALAGKFICSMTGIDCTGGFSPSLDAIVEGLGYAAPPIMALLFILDDEVVKLSPHARAIRDVEDEELRNFFYGMSPWQFILIVAASSVGEELFYRAAVQGALADIFLRGSDFVTDARGMASLTGVLPPYVPFAQAFAAVITAALTGSLYYMAASPKDPTYVVAPVLKSHSGREDLKKLFAAWYERRQIKKIYSPLLEAMLALYLGFEWIQTNNILAPIITHGIYSAVILGHGLWKIHDHRRRLHQRIQTLKQEGNNSRNL

SEQ ID NO: 166 - DNA, 2868 bp, Nicotiana tabacum
tgactccatactctatacactctataataactacaaattgtaattattttaaaatatatttatatatgataaatacagtatataagttagttacatgtaattttttcaaaaaaaaatcacagtgaagatccgtaaattttcagctagaccagcccattctcttcccgcccaaatagtctctaaaccctaaaaacccaaataacattgcaatttgcttcccacagaatacagagcagaacagtgcagaatccgccgccatggaaatcgaagaggctattaacgaagtggaaatggaacccatagcaacggcggcggcgataccgaaggagccaccgaagataaagcggctggaggaatcagtagtgaacagaatcgcagctggggaagtaatccaacggccagtatctgcagtgaaagagctcatcgaaaacagcttagatgctaattccacctctatctcggtcgtcgttaaggattccggccttaaacttatccaagtttccgacgacggccacggcattcattacgaagatttaccaatattatgcgagcggcacacgacgtctaagctgagtaagtttgaagatttacagacgattagttcaatgggatttagaggtgaagctttagctagtatgacttacgtcggtcacgtaactgtcactacaattaccgacggccagctgtacggatacagagcaacgtataaagacggtttaatggtagatgaaccaaaaccttgtgctgctgttaaaggtacacagataatgattgagaatttgttttataacatggcggcacgaaggaaaaccctagagaattcttctgctgatgattatccgaaaattgttgacctaattagtaggtttgcacttcatcacacaagtgtgagcttctcttgtagaaaacatggagctggtagagcagatgttcacagtctagctacttgttcgaggattgattcgattagatctgtttatggagtttcagttgctcgaaatctgatgaatattgaagtttctgatactgattttaagatggatggtttcatttctgactcgaattatattgcgaagaagataaccatggtactttttataaatgataggctcgttgattgtagtgctttgaaaagggcaattgagctagtctatactgctaccttgcctaaagcatcaaaaccttttatatacatgtcaattgttttgccacctcagcatgttgatgtgaatgtacacccaacaaagagagaggtaagccttatgaatcaagaattcatcattgagaagatacagtctgtggtagagtcaaaattgagaagctcgaatgagtcaaggagattccaggaacagaccatggatttttgttcttcaagtccagtggccacaattaaagattccagtaaagattgtccgtcttcatctgggataaagtcgcaaaaagcgccacataaaatggtacgaacggatacgctggacccttctggaaggttgcacgcatacgtgcaaatgaagcctcctagtagttcagaaagaggaggttcttgcttgagttcagtgaggtcttctattagacaaaggaggaatcctagtgaaaccgcggacctcactagcatccaagagctagttaatgagattgataatgattgtcactctggtctattagatgttgttaggcattgtacgtatattgggatggcggatgaggtttttgcattgattcaacacaacacacacctttatcttgttaatgtgattaacttgagtaaagagcttatgtatcagcaagttttacgtcggtttgcacatttcaatgcgattcaactgagtgaaccggcgtcattacccgagctaataatgcttgctttgaaagaagaagagggtatagatccccaaggcaatgaaagcaatgagctaagaggaaagattgccgagatgaatacagaactgctcaaggaaaaagctgaaatgctagaggagtattttagtgtttatatcgattcaaatggcaatttgtctagacttcctgttatacttgatcaatacacacctgacatggaccgcatcccagaatttgtactttgtttgggcaatgatgttgattgggaggatgagaaagtttgttttcagacaattgccgctgcccttggaaatttgtatgccatgaatccaccattactgcctaatccctcgggtgatggcttgaaattctacaaaaagaaagtgctttcgagtggttcagtaggaacagcttctatggaaaacatagagaatgatatcatggagtctgaatatgaggaagaattactttcggaggctgaaaatgcctgggctcaacgcgaatggtcgattcagcatgttctgtttcccgccctcagactcttcttcaagccccctaattccatggctaaaaatggaacttttgttcaggttgcttcactggaaaagctctacagaattttcgagagatgttaaacatggagaattttgacgtgtgctccttgaagcaaaatgatgtacatatgaacagcttttgtcctctacctacgtctgttgtgaaaagaagcaaaatggaaggtaaaagtttgtgtctactcaaatacacggctccattaaatggcatctcagacagggaaagagtacaccaaagtttgtcaaatattgcggaaaaacttcttgaagagattcagttagccaaaatctcttaaagaagatctccgcattgtttgaggattttgatagttaggagttaggagaagaatggaaattgatttgagttagttctatggatttagggtttagattcatgtacatattcaaagatctcaatttgctgcagtaaaatcacagaggcagtagctttcacatc

SEQ ID NO: 167 - DNA, 2217 bp, Nicotiana tabacum
atggaaatcgaagaggctattaacgaagtggaaatggaacccatagcaacggcggcggcgataccgaaggagccaccgaagataaagcggctggaggaatcagtagtgaacagaatcgcagctggggaagtaatccaacggccagtatctgcagtgaaagagctcatcgaaaacagcttagatgctaattccacctctatctcggtcgtcgttaaggattccggccttaaacttatccaagtttccgacgacggccacggcattcattacgaagatttaccaatattatgcgagcggcacacgacgtctaagctgagtaagtttgaagatttacagacgattagttcaatgggatttagaggtgaagctttagctagtatgacttacgtcggtcacgtaactgtcactacaattaccgacggccagctgtacggatacagagcaacgtataaagacggtttaatggtagatgaaccaaaaccttgtgctgctgttaaaggtacacagataatgattgagaatttgttttataacatggcggcacgaaggaaaaccctagagaattcttctgctgatgattatccgaaaattgttgacctaattagtaggtttgcacttcatcacacaagtgtgagcttctcttgtagaaaacatggagctggtagagcagatgttcacagtctagctacttgttcgaggattgattcgattagatctgtttatggagtttcagttgctcgaaatctgatgaatattgaagtttctgatactgattttaagatggatggtttcatttctgactcgaattatattgcgaagaagataaccatggtactttttataaatgataggctcgttgattgtagtgctttgaaaagggcaattgagctagtctatactgctaccttgcctaaagcatcaaaaccttttatatacatgtcaattgttttgccacctcagcatgttgatgtgaatgtacacccaacaaagagagaggtaagccttatgaatcaagaattcatcattgagaagatacagtctgtggtagagtcaaaattgagaagctcgaatgagtcaaggagattccaggaacagaccatggatttttgttcttcaagtccagtggccacaattaaagattccagtaaagattgtccgtcttcatctgggataaagtcgcaaaaagcgccacataaaatggtacgaacggatacgctggacccttctggaaggttgcacgcatacgtgcaaatgaagcctcctagtagttcagaaagaggaggttcttgcttgagttcagtgaggtcttctattagacaaaggaggaatcctagtgaaaccgcggacctcactagcatccaagagctagttaatgagattgataatgattgtcactctggtctattagatgttgttaggcattgtacgtatattgggatggcggatgaggtttttgcattgattcaacacaacacacacctttatcttgttaatgtgattaacttgagtaaagagcttatgtatcagcaagttttacgtcggtttgcacatttcaatgcgattcaactgagtgaaccggcgtcattacccgagctaataatgcttgctttgaaagaagaagagggtatagatccccaaggcaatgaaagcaatgagctaagaggaaagattgccgagatgaatacagaactgctcaaggaaaaagctgaaatgctagaggagtattttagtgtttatatcgattcaaatggcaatttgtctagacttcctgttatacttgatcaatacacacctgacatggaccgcatcccagaatttgtactttgtttgggcaatgatgttgattgggaggatgagaaagtttgttttcagacaattgccgctgcccttggaaatttgtatgccatgaatccaccattactgcctaatccctcgggtgatggcttgaaattctacaaaaagaaagtgctttcgagtggttcagtaggaacagcttctatggaaaacatagagaatgatatcatggagtctgaatatgaggaagaattactttcggaggctgaaaatgcctgggctcaacgcgaatggtcgattcagcatgttctgtttcccgccctcagactcttcttcaagccccctaattccatggctaaaaatggaacttttgttcaggttgcttcactggaaaagctctacagaattttcgagagatgttaa

SEQ ID NO: 168 - protein, 738 aa, Nicotiana tabacum
MEIEEAINEVEMEPIATAAAIPKEPPKIKRLEESVVNRIAAGEVIQRPVSAVKELIENSLDANSTSISVVVKDSGLKLIQVSDDGHGIHYEDLPILCERHTTSKLSKFEDLQTISSMGFRGEALASMTYVGHVTVTTITDGQLYGYRATYKDGLMVDEPKPCAAVKGTQIMIENLFYNMAARRKTLENSSADDYPKIVDLISRFALHHTSVSFSCRKHGAGRADVHSLATCSRIDSIRSVYGVSVARNLMNIEVSDTDFKMDGFISDSNYIAKKITMVLFINDRLVDCSALKRAIELVYTATLPKASKPFIYMSIVLPPQHVDVNVHPTKREVSLMNQEFIIEKIQSVVESKLRSSNESRRFQEQTMDFCSSSPVATIKDSSKDCPSSSGIKSQKAPHKMVRTDTLDPSGRLHAYVQMKPPSSSERGGSCLSSVRSSIRQRRNPSETADLTSIQELVNEIDNDCHSGLLDVVRHCTYIGMADEVFALIQHNTHLYLVNVINLSKELMYQQVLRRFAHFNAIQLSEPASLPELIMLALKEEEGIDPQGNESNELRGKIAEMNTELLKEKAEMLEEYFSVYIDSNGNLSRLPVILDQYTPDMDRIPEFVLCLGNDVDWEDEKVCFQTIAAALGNLYAMNPPLLPNPSGDGLKFYKKKVLSSGSVGTASMENIENDIMESEYEEELLSEAENAWAQREWSIQHVLFPALRLFFKPPNSMAKNGTFVQVASLEKLYRIFERC

SEQ ID NO: 169 - DNA, 2412 bp, Nicotiana tabacum
ttgcactcaaaaaccaaatccccatagcacaaactgcaggcaactcttgttttctaatctctatattcaaatcttgatattaaaaaaaaaaattatcccatctttttttaagccttatatttttccattttcctccacttccctctattaaacaacaagaaaaaagcagttttttaaaatatttttctttttttatagttttcttgaattttcttgtgtttgttgtacttttgatgttttggtcaatatggctggtttggatttaagcactgcttctcattttgttcatcaacttcaccatccatctgactttaatctccaaagacaacctgatgatattgaagttaactacaaaaatcaattttccgatgaccatcaccacggcgatagtggcggcggtcaccagaatcaaggttagagagaacatacttttatttacttataaattatattttcggtcaacacgtccatcacccttgaaatcttgaatccaagaccctttgtctggtattatattacattgagttatgcgacactctcgtcgggagtgtcgtcgggtagggtaaggtctgcgtacactatattctcagacccttcacctgtgggattttactttgtcgttgttgttgttgttgttatgtatgcgatagtctcatctaaaaatttaaattgttggaaagaacatacttttatttacttaattatgtttttacaggtgaaattgttggtcggcgacctagaggccggccaccggggtccaagaacaaggcaaaaccaccagtaatcatcactagggaaagtgcaaataccttaagagcacatatattggagattggaaatggatgtgatgtttttgagtgtgtttcaacttatgctcgaagaagacaacgtgggatctgtatattaagtggtagtgggacagtaacaaatgtgaccattagacaacctgcggcagctggttctgtagttacattgcatggaagatttgagattctctcactttctggttcttttttgcctccaccagctcctccaggttcgagattttatgaccatctcatctaaaatctaaaaatttaaagaaaatcaatggcagagctaattagttcgacgaagagggttcagttgaatcccctcggtcgaaaaattataccctaataataggggaaagtcaaacttttgtgtatatttgtatatttaatgaagtcggttccttatgttgtgacaatctcatctaaaaacttatgctgttagagaaaatcagtagcgcacatagctaagttcaaatgtcctgctattacttgctatcagttcttcttccatcttttctttagtcgagggtctattggaaacagtctctctgaatctttcaagataggggtaaggttgcgtacatcttgccttctcataccccacttgtgggatttacactttgttgttgttgttgttgttgttgtacatagctaatgtcaataaaggcttcctttgtcgaaaaattatactgtaataatagggtaaaaacaactttttgtatatctgtatgtaattgaatttccttgacataaggaaattaaagtcttaaatgtagtggtaagaggggttcaagaattatactattagatatggcattcttatttttctattgaatccctttattaggattcttggttccataaccgatgaaaatacagttctatttacttaattatgttttcaacaggtgcaacaagcttgacgatattcttggctggtggacaaggacaagtggtaggaggaagtgttgtaggggaattgattgcttctggaccagttattgttatagcttcatcttttacaaatgttgcatatgagagattgccattagaggaagatgaaggaagtctccaaattcaaccacaggtatcacaagtttctagtggcaatggccctaatagcggtggcggcggtggtggtggtggtgttaataataaccaatttcctgacccttcatctggatttccattctttaaccttcctttgaatatgcctaatggtcagctaccatttggagtctgaaaactactccctccgttccactttacgtgacgtatagtttgcagtacgagagtcaagctgactaattcttgaagattagagtaatggatgttgagtactatcattcaaaagctcaagtcgcgttgtttatatcgaatgaaatcgatgaagaaattagggttcttgaatcataaaaaggtaagagaattagtgtaccatgtttgtactagtagtcttagtgattgttggacttattttccacttctatattaggggtttttaatttttttttttcttgtttattgttcttggttttgtaactctatgaattctgaaaatacttcttcactctttaatgttctgaaatggtttgagaat

SEQ ID NO: 170 - DNA, 822 bp, Nicotiana tabacum
atggctggtttggatttaagcactgcttctcattttgttcatcaacttcaccatccatctgactttaatctccaaagacaacctgatgatattgaagttaactacaaaaatcaattttccgatgaccatcaccacggcgatagtggcggcggtcaccagaatcaaggtgaaattgttggtcggcgacctagaggccggccaccggggtccaagaacaaggcaaaaccaccagtaatcatcactagggaaagtgcaaataccttaagagcacatatattggagattggaaatggatgtgatgtttttgagtgtgtttcaacttatgctcgaagaagacaacgtgggatctgtatattaagtggtagtgggacagtaacaaatgtgaccattagacaacctgcggcagctggttctgtagttacattgcatggaagatttgagattctctcactttctggttcttttttgcctccaccagctcctccaggtgcaacaagcttgacgatattcttggctggtggacaaggacaagtggtaggaggaagtgttgtaggggaattgattgcttctggaccagttattgttatagcttcatcttttacaaatgttgcatatgagagattgccattagaggaagatgaaggaagtctccaaattcaaccacaggtatcacaagtttctagtggcaatggccctaatagcggtggcggcggtggtggtggtggtgttaataataaccaatttcctgacccttcatctggatttccattctttaaccttcctttgaatatgcctaatggtcagctaccatttggagtctga

SEQ ID NO: 171 - protein, 273 aa, Nicotiana tabacum
MAGLDLSTASHFVHQLHHPSDFNLQRQPDDIEVNYKNQFSDDHHHGDSGGGHQNQGEIVGRRPRGRPPGSKNKAKPPVIITRESANTLRAHILEIGNGCDVFECVSTYARRRQRGICILSGSGTVTNVTIRQPAAAGSVVTLHGRFEILSLSGSFLPPPAPPGATSLTIFLAGGQGQVVGGSVVGELIASGPVIVIASSFTNVAYERLPLEEDEGSLQIQPQVSQVSSGNGPNSGGGGGGGGVNNNQFPDPSSGFPFFNLPLNMPNGQLPFGV

SEQ ID NO: 172 - DNA, 2714 bp, Nicotiana tabacum
cttacttcctaaactttccaaaaaccaaacatctctctctctaaaaaaattggtgtagaaaaaccagagctttactactaaagtctttcaaactggcgattgataatcaagattccacagtcttagaactcaagcctaagaacagaagaataatggtaaatttccaacaaccccaaaaactcctttagtgtttttcaataattttttcatcaatttgattgctttcaactctcttttttgttcatttattttaaaattctgtctcttttttggtattagggagctggaatacctgatgaagaggaaaataattggccactatggttaaagccattgcttaaagaaaaattctttggtcattgcaaattacatgctgattctcacaagagtgaatgcaatatgtattgtcttgattgtataaatggtcctctttgttctctttgtttagcacatcacaaaggccatattgccattcaggtatcttctttttccttaataaaaaaattgggctttttgtgtcaatttgtaagaaatttagtatttggtttattgtttccacacgctttagttctccctgtttagcatccactaatgcttgtattataatatatcatgttcctaggtgtacgacccttccccaaaccctatgtgagtgcaagatattttgtgtatcgagctgactttttgctacacagtgtatacaatggcagaactagaaattttaacgagggtttatagctacacattgtatatggtgacgaacccagaatttctaacaatggggttcaagaaaatgcttaagtgtcacacttgaagtttgatcatgttattttaagcaatttttaacctacctttaccgctatactaaaatcttttttatgtaaaaaatattcaaaatgtcaaaaaaagtatatttttgtcctacttttcagtataatttttcgacgagtgattcaattgaacccctaaattgtcattttacatagtgtatagctatgatatctcaaaggataagtcttgaaattatgaatgattgattttgagtgctctgtttttgtttggttggacagataaggaggtcatcataccatgatgtgataagggtaaatgaaattcaaaagtatttggacatttcttcagtccaaacatacattatcaacagtgctaaggttgtctttttgaatgaaaggccacaacctaggccaggcaaaggtgtaacaaatacttgtcaagtttgtgaaaggagccttcttgattccttcaaattctgctctcttggttgcaaggtacattactgtttactttttctagtcgatatacattgattatacacagtgatcaggaggttatgggttcaagcgtggaaacaacctcttgccgaaatgcagggtaaagctgcgtacaatagatccttgtggtccggcccttcaccggatcccgcgcataacgggagcttagttcaccggtctgccttttatacacggttatgcacatattatacatggattttgcatatattatacatctaactgcaatttttagtttaaacgtgtgggtgaatgctatttaggttaattgttttgaaaaaaattctcttacagtttcattaaattgtaccattttttttcatcttgaccaaatttccttgcattaattttgacttttaatggcattgaattgaattgggcgtgtccaaaaatcttgaattgcgtgtatttcaaggtatattttggtttaatggtcgttgatagtgtggtttgacaaatgtgaagcaattaaatggggcgtggaaatttcactcatatttactagtctattgataggaaaactttggcataatcaactttttttaattggaaatttcaaagttgttagacattgtaattatcaatgactctcttgcatttatttagtaccccaaatggaaatgacattcaaatcttgattattagcaatctttgatatacaatagatattatgtgaattattgaattggtccgaatagaacataacgaatatagatgatttatatagtcgatttcaacttgatcatcgcaggttgtcgggtcctcaaagaatttcgttaagaaaccgaagcaattgtcggtgaaaaggcggcggtcggtggcgatggcatcggactcctccgatgactcttacagcagcagcagccatggtaggtacaagagccacaacaacaaggtccaaagttttactccgtcgacgccccctccaacttcagttaattacaaaatggccaagcgaagaaagggaattccacatagatccccaatgggaggactacttatagaatattaagtccttttatacaccaaaaaattagcataattcccccacatataccaaacacttgtgcttttctccaaagaaggctagtgtttgatagctttgtctataagaacaatataatgtatatagtgttggcaagttgaaaagttagagggtgagagttgaaataagaaaaaatgcaaggactaaatgggataagttagaagttgggattagataataatgctatagtatataggatgatgaaatatcagatatgatggctcttggcttttagagtggttacataggttttgtgtgtttgactttttctttttaaattttgtatcaaaattgtagatatactgtaatattgccaggatattttaacattatgtctatacatagatggtattttagtattg

SEQ ID NO: 173 - DNA, 678 bp, Nicotiana tabacum
atgggagctggaatacctgatgaagaggaaaataattggccactatggttaaagccattgcttaaagaaaaattctttggtcattgcaaattacatgctgattctcacaagagtgaatgcaatatgtattgtcttgattgtataaatggtcctctttgttctctttgtttagcacatcacaaaggccatattgccattcagataaggaggtcatcataccatgatgtgataagggtaaatgaaattcaaaagtatttggacatttcttcagtccaaacatacattatcaacagtgctaaggttgtctttttgaatgaaaggccacaacctaggccaggcaaaggtgtaacaaatacttgtcaagtttgtgaaaggagccttcttgattccttcaaattctgctctcttggttgcaaggttgtcgggtcctcaaagaatttcgttaagaaaccgaagcaattgtcggtgaaaaggcggcggtcggtggcgatggcatcggactcctccgatgactcttacagcagcagcagccatggtaggtacaagagccacaacaacaaggtccaaagttttactccgtcgacgccccctccaacttcagttaattacaaaatggccaagcgaagaaagggaattccacatagatccccaatgggaggactacttatagaatattaa

SEQ ID NO: 174 - protein, 225 aa, Nicotiana tabacum
MGAGIPDEEENNWPLWLKPLLKEKFFGHCKLHADSHKSECNMYCLDCINGPLCSLCLAHHKGHIAIQIRRSSYHDVIRVNEIQKYLDISSVQTYIINSAKVVFLNERPQPRPGKGVTNTCQVCERSLLDSFKFCSLGCKVVGSSKNFVKKPKQLSVKRRRSVAMASDSSDDSYSSSSHGRYKSHNNKVQSFTPSTPPPTSVNYKMAKRRKGIPHRSPMGGLLIEY

SEQ ID NO: 175 - DNA, 5407 bp, Nicotiana tabacum
cctaatattccaaactttctttccctttttctccttccactttctttttcctttttcttttcctttcctcctttttttctcttttcacactacacactctctctcaaacagagttttcagtagacaacccccccccacccccaaaccctagccccccacaacacacgcacaacaaaatccatacttcactgtgaaaaaaaaaatccttttcacattgcatcagtatattcttttttgtctatggattctcaagaacccccaccacttcacccaccccaccttcaatctctaccaccccaccaccaaccaccacccccacatgcccatggatcaatggtgtcacccccacccccaccaccccaattccaccaaccccaccaaccccaccaacaaaaacaacccacctttcccacacacaacaatatccagcagcagcagcaacagcaacaatcccaacaacaaaacttacaatttcccttcaattcagtttctggaccaaacccaaaacccaatcttgattactctgatggatcatcatctgctgctttaggtttaagcattgagcctgctaagaagaaaagaggcaggccccgaaagtactctactgataataataataataataataataataataataataataacattgctttaggcctttctcctaatccagttactcaaattccttcagtggtgagtcatacagattctgctgctgctggtaataatggagagaacccttctaagaagtcccgcgggaggcctcctggctcgggaaagaaacaagtagaagcttttggtatatatttgtcttctttattgctttaattatgtatctagctgatttaattatgtatctaggtttaaatcttagtagagacaaaaaatagtagtgatttattcgcgtttgcctaagccttggagggtagagttactccatacttgtgctggtgggagtaagcaggtacctggtggaatagttgaagggtgcacacctcaccgtcataaaacaaattatgtattgagcttctaattaggaaatgatttaacttatatacattggtaatgcaaacaacttaatttatatacacggataatgtaaagaataatctgttgtggcaggtaacttgccttattttgcaggttactaatctcactttttatggagggtttacattatcaatacatagaagttgaaactcatttggaaaataattttgtttatcattgcaatattttaggattgccttttttttgtattaggtaacgtgccttattttttaggttactaatatgatacattgggattataagtatcataatcccactttttatggacggttacattacatgtagataacctgacatttacactgtcaatgcatagaagttaacttcatttggaaaggatttaacttatttacattgataatgtaaagatttttactatattagtgtagttcaagttgttgtagtaggtaagccttatttttccgggttcctaatccccactttttatagatggttacatgtagttaacctgccatttacactatcaacgcataaaagttaaaaactcatttggaaatacatatgcttattattgctaaacttttgtactgcctttttatttcctcaacctttccctatgtcccaatttatttggcactatttgcttatgagtctggttaggggccaaatatattggaaaaatttaaatttgaaaaattaaaatttagtatgtggatatgcaaagtactataagttgcaattcttgtaggaaaagggtgaaataaaaatcttaagatgctggtcaaagtttggtcaattgaaaaaaatcttgggaagtgaaaagtgccaaacgttttgtgacagaggtttgtgtttaccaatttagcacctgcaacatagtgattattgggtttcttgatggttgataggtgcagttggatttggcttcacaccacatttaatcactgtgaatattggcgaggtaaaatatctttttgcttattgatctttggggtaaagcatgcaattttttacagcatgttttacaaaactctgattaacctatgtattttacacatgcatgagtctgcatattttttgtgctgtatgttgttgttctatcacggctagagtctcaagtttcttattagagaaaaatgaagattcagtatacttctgtatatagtttttcgttggcttccttcttaatcttttgggttgatacgccaataactgattgatggacaagtattctaggatgaattaaaagaaccaatatacaatatttgatggagtttctaatggtgaaataaaggtatgattttgtgcagcgtttccgagttgcaatacagtggtttggaaggatgagatattttttggatcttttgtaagttggaaattgaaaattttacctttttgtctttcatgagctaaataaggtactgttgttaattcatgtcagacatcagagtttcatttgtgtgttcttcgttccaatcatcattagtctctttccttttatttgtacaggcaagatcttggctcttccgtcttgacttctcttttttagttgcattaagtttttttccttcctatgcatccttatatctcaaacatgttaatgaattacttggaggttgtaattttcagctttttgattagatgttatcagagttggcttccattagattgtttgcttgtgggtttcaaggtttaaactttaaacagaggtagtatcttggtgatctaggttaaacttaaagtgggatatggagcgtcttttggtggtgaatttctttaaaacccatgcacctggtttttgtatttactaaaggtgctaccatatctaaatcgcgcatgttgttgcatcagttgttgtttatggtgaatggtaactgaaattttgtggggttcacagctccatttgttaacaataaaaagtctaatggaactaatacgtaatatttatatcttacctataatcaaacttcttgtttaagtttggctttagttgaagtcccagccttgtgaatttttggttgagttttctttatgattgcgaatctgttaccttggacgcaggacatatcgtcaaaggtaatggctttctcacagcaaggaccacgggcagtttgtattctatctgcaaatggagctgtatctaatgtcacccttcgccaacctgcaatgggtggtggcactgtgacctatgaggtttgtatgagtttcagcttcaagacacttgccttttctgttgccttatgctgttgcatgtgtagtagttcttaattagcctatgtataattgtatatgttacagccttttggctggtagttctctttctgttagaagtgtttgtataggagccatgaatgtacttgaagcaggatgaaacacaataaaaccttcaacagatggtgttaagcccacacgaaaagaatgaattcagttgaggcttctttttctccctttttggtctttcttctcacctttatgagccgagagtctaccggaaacaatctctctaccttcactaggtaggtgtaaggcctgcgtacacactactctctccagactccacttgtgggaatatactgggagtgttgttgttgttgttgttgatgtcagagacttcttcttcatgtatgaagcataattattccccttgaaatgtcatttttgcagtagttggttaatacgagtttaggtgtatctgatcgttttattttatgacggatgaccttgtggttttgttatgttgacatcaactcatgcgttgtcaatcttatccaaaagaagagactgagagaaaaaatgagagctgctacaatggaaaaccattgctttgggtagttctgagtaataaacttatctggaacgattttccatactaattttcagttaatgggattgtcttgatggctctatcttatgtattgcatatttcacaagtaatttgatgtgcgtttattgcaaaagttgtgaagtgtctgctgtatgttaatgctgatgattgcatgtataccaattgtcttctaacatacctttttggcgttggtcatcgaacatggtgttactctttatatgcagggccgatttgaaatcatctcgttatcaggttcgttcttgctttcagaaagtaatggtagtcgtagcagaacaggtggtctaagcgtgtcactatctgggccagatggtagagttttgggcggtggagttgcaggaatgcttatggctgccactccggtacaggtgctattctaactgcctcttcatcggaaaattttactaaatttacatataataatgtgcaaaaagttggaacaaataatgtacaaagacactgctcaatgaatagtgcttcctagtccactggtcaagcgtttcatttgcttaaatagaggttaggggttcgaacctcaacctgcatatgtatttttagcctcttttcttaaaaaataaaggtggtacaaaaccgaaccctgacctctagaaataagattcgactaaaccaataggctaaataaagccccttcacaaaaactgaagatgttataatgttacacagttgatttgcgtgtttgcgctcttctagtcttctttaaatgtcgactccacttgtgaaaaatccgcatgccgctgtatgcatatcgtgttacttgctaacggcttcttcttcactaccaggtggttgtgggtagctttattgcggaagggaaaaagcccaagtctaaggcaccatctccacctccaccttccaatatgttgaattttggtgctccggtcaccgaggcgagctctccttcccagggtgcctcaagcgactcatcggatgagaatggtggcagtcctctcggccacgaacaaggacctttcggtaatgctgctcaaccaatgcacggtatgccaacgtactggggccaaacaatgtgaaaatgcttccttcacttgacacgacgatcccaagggtatttgacttcttgatccgcgactgatcattggcagcagattatagccgtcatatcgagttttgacttaagcttgattatctctcttttttcttctttttccttgcttggtcttcaccctttagtttatcagttgtaggataggtcaaaaggcatggctaatttgcagaaagtcaagtcatggtttcttcaccaccttagtcttagtatattttaggtgactgtgtggtttgagtatttacttattctctgattgccaaaccaattttataactttcttttctaggtatttgttagatatggtagtcataaactgagttgattaggtctcaatgcaattactatttctgctataataattcttctatttccaattagaagtttgccctcttttctttcacttagaacttgctaatttaagactt

SEQ ID NO: 176 - DNA, 1155 bp, Nicotiana tabacum
atggattctcaagaacccccaccacttcacccaccccaccttcaatctctaccaccccaccaccaaccaccacccccacatgcccatggatcaatggtgtcacccccacccccaccaccccaattccaccaaccccaccaaccccaccaacaaaaacaacccacctttcccacacacaacaatatccagcagcagcagcaacagcaacaatcccaacaacaaaacttacaatttcccttcaattcagtttctggaccaaacccaaaacccaatcttgattactctgatggatcatcatctgctgctttaggtttaagcattgagcctgctaagaagaaaagaggcaggccccgaaagtactctactgataataataataataataataataataataataataataacattgctttaggcctttctcctaatccagttactcaaattccttcagtggtgagtcatacagattctgctgctgctggtaataatggagagaacccttctaagaagtcccgcgggaggcctcctggctcgggaaagaaacaagtagaagcttttggtgcagttggatttggcttcacaccacatttaatcactgtgaatattggcgaggacatatcgtcaaaggtaatggctttctcacagcaaggaccacgggcagtttgtattctatctgcaaatggagctgtatctaatgtcacccttcgccaacctgcaatgggtggtggcactgtgacctatgagggccgatttgaaatcatctcgttatcaggttcgttcttgctttcagaaagtaatggtagtcgtagcagaacaggtggtctaagcgtgtcactatctgggccagatggtagagttttgggcggtggagttgcaggaatgcttatggctgccactccggtacaggtggttgtgggtagctttattgcggaagggaaaaagcccaagtctaaggcaccatctccacctccaccttccaatatgttgaattttggtgctccggtcaccgaggcgagctctccttcccagggtgcctcaagcgactcatcggatgagaatggtggcagtcctctcggccacgaacaaggacctttcggtaatgctgctcaaccaatgcacggtatgccaacgtactggggccaaacaatgtga

SEQ ID NO: 177 - protein, 384 aa, Nicotiana tabacum
MDSQEPPPLHPPHLQSLPPHHQPPPPHAHGSMVSPPPPPPQFHQPHQPHQQKQPTFPTHNNIQQQQQQQQSQQQNLQFPFNSVSGPNPKPNLDYSDGSSSAALGLSIEPAKKKRGRPRKYSTDNNNNNNNNNNNNNIALGLSPNPVTQIPSVVSHTDSAAAGNNGENPSKKSRGRPPGSGKKQVEAFGAVGFGFTPHLITVNIGEDISSKVMAFSQQGPRAVCILSANGAVSNVTLRQPAMGGGTVTYEGRFEIISLSGSFLLSESNGSRSRTGGLSVSLSGPDGRVLGGGVAGMLMAATPVQVVVGSFIAEGKKPKSKAPSPPPPSNMLNFGAPVTEASSPSQGASSDSSDENGGSPLGHEQGPFGNAAQPMHGMPTYWGQTM

SEQ ID NO: 178 - DNA, 789 bp, Nicotiana tabacum
gatgaagcaccagacgaaattttggcacttaaaagtgcttcctggagaaaaattggatgaaacctcaggtaggatgatgtgtcgttacgcatagtctcaaatggaattatgtttggcatttgtggatggagcatttcattggctcggtgtgtttccaaggtccgtggtttcatttaatatttcgaatgagatgtatggagagataccactgccagtgatagagcgcacgtcctatagaatggtagaagagggtgtatcagtgttgggaggaagactttgtttttatcataatgacgcgataaattttaatttatgggtaatgaaagactatagtgtcaaagaatcttggacgaaatggttcaatttaccaagcaatggggttgatatcataccgatatatatgtttcccgatgatgaagtgctacttacctactttggttcggaaggaactgtatacaggacatccaatggatcatttggattaagcaataaaaaatggcctctagattgtgatgatattcaacctattaccattcaggatggttttgtttatatagaaagtttgatctctccaaaattaggtcactagttaattgtctgtgttactgttttttgcacttctagtctctagatctattaaacttcgctcaatttcctctttaaatttatttattctgttgggtttactcgttttgttgtctattgataaattttctcttaaatttattgtcaatataactgatgattggaaaagataatttttcaactgttcgtgtgtgattttcttca

SEQ ID NO: 179 - DNA, 489 bp, Nicotiana tabacum
atggaattatgtttggcatttgtggatggagcatttcattggctcggtgtgtttccaaggtccgtggtttcatttaatatttcgaatgagatgtatggagagataccactgccagtgatagagcgcacgtcctatagaatggtagaagagggtgtatcagtgttgggaggaagactttgtttttatcataatgacgcgataaattttaatttatgggtaatgaaagactatagtgtcaaagaatcttggacgaaatggttcaatttaccaagcaatggggttgatatcataccgatatatatgtttcccgatgatgaagtgctacttacctactttggttcggaaggaactgtatacaggacatccaatggatcatttggattaagcaataaaaaatggcctctagattgtgatgatattcaacctattaccattcaggatggttttgtttatatagaaagtttgatctctccaaaattaggtcactag

SEQ ID NO: 180 - protein, 162 aa, Nicotiana tabacum
MELCLAFVDGAFHWLGVFPRSVVSFNISNEMYGEIPLPVIERTSYRMVEEGVSVLGGRLCFYHNDAINFNLWVMKDYSVKESWTKWFNLPSNGVDIIPIYMFPDDEVLLTYFGSEGTVYRTSNGSFGLSNKKWPLDCDDIQPITIQDGFVYIESLISPKLGH

SEQ ID NO: 181 - DNA, 10283 bp, Nicotiana tabacum
gattttccttataaacatttctaaaatgtaaaaccagctcatcggaggaactgaacacatgcgttataaattataataatcaaaaagcataattaaaatctcaacaacaaattttcatttcatttcatattttttaatcaaaacagtttctttccccaaatcgaacaacttttcccccccaaatcacctgaaaaaccctagaaatctcaaattttgatctgatttggtggctattattgtagaattggatcatttctgattagcagccatgccagtggcggcttcagcaatatattttttgaatcttcgtggagatgtacttataaatcgcctctaccgcgatgatgttgggtatgttctcattttattcccaattatttatttatttttcgactcactttttgtttattttgatttatggaattagtttaagataattaattgttcagttttgaactttgatgaataaattagagttttgctgctcgtttttgtaatgtgtggtgctataagctcaaagctggaaccttttgcattgtttgtattgctgtatacgaaaaattatttatgcataaaattttgcctaactaaaaatactgtttgctggttaaaattgtgcattgctaaagcaaattttttattactctgaccatgtatgaattttagtgtataggtctgcataagtaatataatactatctgttttttggtataaactccatttactgatgtccgcgtagcttactacattactctgttatgtttctcatttaactatgaacctttcttaattttatcagagggaatatggtagatgctttccggatgcatataatgcagtcaaaagaacttggtacatgtcctgtccggcagattggaggctgctcttttttgtacatgagaattagcaatgtctatattgtgattgttgttagcagcaatgcaaatgttgcatgtgcattcaagtttgttgttgaggtaacactcctcttggtatcagaatctcacctgtgcacctgataattccggtctcaagcactgctgtttatttgtttgctacgaaagctttcatcttctttttcccctttttttttggggggggtggtggtggttttttttgggggggggggggtaagtggagaaggtacatttttgcactctgaacatccggtttttgctgttaagatgcagacgggaagtattttgttgcgtaatatggttggagtagttttctattcctccaccccccacccctcctttttttaattttttttcggctactaattccattcctagttgagttgtgctatcttttcttttaggttcactaaagtgacaaataatagcctttggctgctattaaaaagaaaccttttcaaatgagctgttttatatatctgtcttatgggatcaagttctgcatatccacatggtcagatttttaatcttagtgaatggcagcctgtgtggtttttgggtagcttgaggggatccgttacctctcatgcttttcattcaggtaatggaagccttgggtagaatgatggatagagaagtgggagatggtttcttgaggggcaacacacagtgaggttccataacgagaagtagacatcactttagttctgtgatacagacataaaccggccgagttatctgaggtagattcttatgtggttccaggtaacgttaggaagtgtgagatcattttggtaggtgatgtggcaatattgaagatctagcacgactgctcaattgcggggttggagctcttccaactgcttatctcaatttacctctgggtacgcccaacaaagactaaacagtatggaactcagtgattgagatagttgaggaaaggctagcaggccgacaaaagaggtacctgtccaaaggggagaaagaagtaccaaattaagagcactatgtcgagcattcttacgtacttcatgtctttgcttaatgcactagccaatatcataggtaaactacgaaggtttcataggaactttctgtgggattcaacaaatggggagaggaagttccgcttagtaaggtgggaggatgttatgtctcctaaggaatttggggactgggggtctagggtgaaacatcgcttagttttcaaaaagtctctaagggtattagttatggagattctctatggagggaggtgatagtggaaaagtatggagtggcggaatggggatggaggactaaaaacttcttttgagtgtggactttggaggaatattatgtagggatggaagattacatcagcaacataaatttcaaggttgggtatggcagtaaaatcagcttttggagtcacaggtggtgtagagaagagatttgaaactcacattcctgaacatttgcaacttctcaagccagaaggagtcgatagtacgacatatccaaaggttacaaggtggagggtgggggagggggagggaggggggaggaattcatgggttataaaggttaggaggagccttcaacgctgggaggctgatgaattccaaggtatagttgaaatgctttacaagctaagtacatcacacattattcaatggagatgaagagcaggaagcgatgaattgtcttcactgaagtcgtattatcataagctcttagtgagggaagaatcgagttttctgcaattatcagtttgggattcccaggacaccaagaaaggtgtgcttttttaattggcagtgtgaggagcaatcctgagtgctgattttttttgtaaaaggaggattgcatatgtttgttagtgttttatgtgcatatgttctggtgaagatgttgatctcctcctcctacattgtcaagtggatactcgcccgtgctgtgagatgttgagatgcttcaggatgcaatgagcacagtaaaggatgcacttgctagatggacttttagaaggagaattctgagagcgtggaacttgtgccattggcactcatttgggtcttgtggaaggagagatatataagagcttttagagttccagttcgtatagaggatttggtgttattcatagaaaatcatattatgttgtagattctctacttcttggtatactgcttgtaacccattattaaattttttttaccttatcaaaaaatgtatttgtcttatggataagaagcattccggtaccgatatagtttccaatgctttagttatatagaatttgtggaccttcccttaaatgtactaatacaatctgtcttataaaggggcatttctggtaccccataagaaatggaggttagaaacataatggcataaccatgactttattgcctaaatgtgtttttctgtttgttgttctgtaaatgattcggttttaccacaagattaatagaactgcaatctccaattctctcgcaggctgttacattattcaaatcatattttggtggtgcctttgatgaagatgccattcgtaataattttgttttgatttatgagctattggacggtaagcttttcatagattatttagtttctgacatttttttatctgggtttgacaagcaaaagcctttttttatgaagtaaccttttatgtgtataatagtaattgatttttttctttatttgtataaaaacacagaaattatggacttcggttaccctcaaaatctttcacctgaaatcttgaaactctatattactcaggaaggtgttcggtcatccttctcatccaaggttagttattttacgtgcttgcttccatattatgaccaaagtggtttgaaaagtagattgagattgatctttctgcttgatttacatttataaaattcattcttgagatatatcgcggcaatgagataaacgaggaattttgagtataatatctttcactttctcccttcacaattgcacacaatcctgcagcatgtagataagccagttccaaatgcaacattacaagttactggtgcggttggttggcgcagggagggtcttcattataagaagaatgaggtggtttacttgctatctttcttaatctcttagatcgtttatcttcccaagtatacctgggtttctgatgaaactttatatattcaacaggtgtttctggatattgtggaaagtgttaatctccttatgtcttcaaaaggtataaagttttgtagttttggtggatgcttttttccttcccatttttggttctcgattaatgtattacaattgcaggtagcgtcctccgttgtgatgtaactgggaaaattctcatgaaatgcttcctttctggaatgcctgatctgaagttgggattaaatgataaaattggtcttgagaaagagtcacagctcaagtcccgtcctgctaagaggtagtgtctgcataatcgtgtgtttcatcctttgtgattatgtcagtttgacataccttgttgagctagttgtttcaggaaatgtcacttgaatgtttgtgaactctaggttactatactctttccatttcttttgattcttttagttcttcaaagtctaaacttgatctcctcaaacaggaaaaaattgaacattatctttccctatcattgcacttcgttgtggaagaacatttatgctaaaaaatggaacgagggattagtagttttagagaattactagcaaccttctgaaactggtaggtccgtgcatcgtccactgacagtaggtttagaggttcagcattttgcttctgagtaataatcgtgtattatgagattggtaatgtatctttataggtgagatatacattacctaacctacaccgaatgttatggtatcctcttgaatattttagaaaagagtcgtaaaatgcttttgaatggaagaaagaggcttctactacttgtaaaatgtgcttctttttacatttaactgtttcacgattcctaagatttgaaagctatagtatatagacgtagtaataggaattgcctgagaatttgtcagttctatagcattacaggaaagtgggatttccattggaacacaattcagatgttctggattataggacattacaagtatagagcatctatttttgcaggtgcctttgagtatgtgtttgtaaattttcaacggttacctgatatcagttaaccttataaccttaaagagtgaagataacagttcacttcgtgccattctgcttctttcagttgtttctccattttctgcagtttcataatgctaactgtcttcagactttgtgattatctagctgtatggactccatattagtttcagcagctgcatgtttagatagttatttctgtttttaacatggtatatttctctgccccgccccgtgcagcggcaaaacgattgagcttgatgacgttactttccaccagtgtgtaaatttgacaagattcaactcagaaaagactgtcagctttgtgccgcctgatggtgaatttgaattgatgaagtaagtttgtacttccttctgttcatcgttgttttgggctctattttttgttctcttctcaaaccagaaggcttaactactgttcttcatttgttctagtagtaaaattctgaacgtccttgaaaagttgctcaatgtcaaattagattaatagtacaataattaaggcagcacaactatcaagtatgtctgtcccagaaattgttttcagtatgtcgtggtaaggagtccgttattgttattattattaatattgtttttcttaataacggtggtgtcccagccagtttgtgagcatcatgactaatccaccagcccgcaggaaagaaaagtttccaagaaggaaagatattatatggtagcttgaattctttccgtaaaagttggcactgttttctagaacaaggctttcttctcctataaataggaggcttcctcaccccaatgcatcaatattcttgataatcagaatctctacaattctctctctatatcactccttccccttttattattttataacaaatttcctttttagaccttgtagaatattttaagcatcctacaaaagtcaatattatatacctttcacaactgcgaagaatttaagtttgaattatgatttgatctttcactgcgaagtataaactcagagattttaaagtgcatttagtatcttcttttgctattaccaaggtaattgaaactccaactgctattttgtttaaaactgaatggtttctattattgggtgtttcaaattaatgtctttttctcccttaaatggaatatttacttctaattttatgcaatgaagaacttgatgggttctattatctacattccagtatcccaacaaatcaaaagtattctttctcctcctattgctgccagtctgttcatgttgccactcgtaagtaatcatttgcgttccaaactctaaataagttgtgggaaaattaaaagtattatataaacagcttgaaagttctaacagaatattcaatttgagagaagtacatgaaaaaaaatcctttatatctttgagcaattgaaattgaaatactgtaatcttttgaagtgatgagcaagtttcaactcggggggctagatatatcatctacatatttttgatcacttggaaagtgatgaccagtctataaagattgggtctgggcctttaagctcaaaatatgtaggcaccttgattttgaagtagttacagattatactcataatcatggccataatcttatataataacacctgaaatttgtttatattcaggtaccgtattactgaaggagtaaatcttcctttccgggtattaccaactatcaaggaattaggtcgtacacgtatggaagtgaatgttaaggtttgacatggaatgtatttcaatttgaagcatctgtcttatttgatttactgttgccaaacttgtgttgtttttcaggttaagagtgtgtttggtgcaaaaatgtttgctctgggagttgtcattaaaattcctgtgccaaagcaaactgcaaaaacaagcttccaggtgacatcagggagagcaaagtataatccagccattgactgtttggtgtggaagtgagtattcgatggcttaatcatggttggcataaatttttacctccatttgatttatttcttgaagatgtggtcaaacttttatcatgaagcattctttttcgtttgactcacatttagaccagatgccttagcaaatttgacatatactattgaaacgcaattaatctgtttgtatcttcaattaaaaagcttgatttctttggttttttttattaatggaatcctcctctttatcactagcaaataaaatttatatggaggtttcggcattccttacctcctcaagaaatgggggatcgaaggggtttctaaagtaaagtgtatcagacactaaaaaggaaggacaactctgttagtcaattaaaaatcgttttaaggatgtactccattacaaatgaatcaatttattgtgaaaatatctaaatgagccaatttggatttgtcttccttgtatagaaactgggataatattttgtgtacaggttttctgtagattctggtaaacccttcatcttctagcacatctgacttgattggcttgccttttgcatggctgagtggcctgaattgcttacttttgtgttgtaaccaagaaacttctgagggccagtgtcgcacggtttgaaactcggtggataatgggcccgcccttctaccttctccacttgaatactaggtctgcagcacggatcgaacctgtgtcgttcgcctaaaccacacatcacaaggtgtgctcataccactaggccaaagtcctggaggcctgaaccttatactttcttaagttgctatagatgttctcacagatgctattgtgtctagccataattgtttattatttgagctggtgtttatggaatcaggagtcaatctcaatatacttgtctgctcggtgatcaacatagttgtttagttgcttctggaaaatccccgagatggagcttcagatttggccagcatgtcatttttgtcaatttccaatgaaaggaattgtgacttggaaaaaaggaatggaaggaaaggaattgaaggatatttcaatggactggaaaaaataaaactaagaaacatgaagagtttgttctcttatgcctttggtgtaaagaggatacactttatatacataatcgcgtagggttaggtgaaaatagcctacatgctcatattgtctatatttgtggcatcaccgtgttgggttattaatgaaatcattttgacttgtgcagtccttcaaccgaactatgcatagaaattcacagctctttcatcacttcaaattctcccaccagcagaatttcttggatcatcctagcaacattcatattcacttaattaaactttacagatctgtttctaattactaaccgataaaaaaatctgtttttattactatctgctacttggtgttgtcaaaactcaaaactaaaagcacagagaagcgccaaattttgctaggacttataggacaaagcacaattaaagtgcgggccttagcaaagaaaggagaaaatgagaaagctagtgcatgtttgtgtatgtataatgcaagaaaattaactaaaaaacagaaataacaattatgtggacgggaagatatttctcgaccatattaatctgtgagtttccacatctaatctctttgtttttcactgttttattgtttttgaaaatgactacacaattaaggagcttgttttcctaattcttcatctctagataataatgcacggttcacactgctccattttgttcaacctggagcaattgaattatttgttgccgaaccattagcttagggtgtgcctatcacatgtaccggtatttacacatgcatagtgtctgtgtgcacatgctatcacaggtatttacacatgtattcctatggatgctttctttgtagcaactagaattgcatagtgcatacagtttcatcttagtaaatttgtttatgttgaatgtagaaaaccttacactcatgtacgatactcatctctattaagaacaatatggtattttctttgcatgagttgcttgcctccgacaacttcatgtgctcttgagggagagtaggagaagccaattttcacacttctcgtcctattgggactaattggaggaattgaattaacctaagatcagttgtgtgtaacatcagataatctggcgaaaggaggatcatttcactaggtcctggatgtatatagtaatagatggctcaattttgaaaattcctgcgtctctttttccttccggattctttcttctatgttatgtttatatttcatatatatactacttcaggtttctagttcgtagtaaagcatacaagtggtaagcaaccacttccaaccgagaggttgtgagttcgagtctccccaagagcaaggtgggaagttcttggagggaaggatgccgggggtctatttggaaacagtctctctaccctagggtaggggtaaggtctgcgtacacactaccctccccagaccccactaagtgggattatactgggttgttgttgttgttgttgtagtaaagcatacaagtgtgtttactttcatttttctctggatcgaggagtttgttgttaatacaacttaattatacaatgatcatgttctatttttgtcagtagtcacttatctgtttttgctgcattcttctgcattaaatctagtttttccgagagtagaattttcaatatatgggcaatgtggtgcagaataagaaaatttccggggcaaactgagtcaacattgagtgctgaggttgagttaatttcgacaattacagagaagaagtccttgactcggccgccaattcagatggaatttcaggtacatatttgccctaccacatgacaattgtgttcctctgcagtttgtaattttggcatgataacatgttttattgtggtttatttggcgctagtattctttaccagttccttgttcgatgcaggttcccatgtttacagcatctggattgcgtgttcggtttctcaaggtatgtttggcaaaattacaattcaatagtgcttttctttggtatgaaattcagcttcatgtggttagctctgtgcaggtgtgggagaagagtggctacaacacagttgaatgggttcgttacataactaaagctggttcatatgagataaggtgctaagataaaacagcttatgtgagtttgaggctgttgtagattgatgcccagtgtaaatgtaatctgttcgaa

SEQ ID NO: 182 - DNA, 1317 bp, Nicotiana tabacum
atgccagtggcggcttcagcaatatattttttgaatcttcgtggagatgtacttataaatcgcctctaccgcgatgatgttggagggaatatggtagatgctttccggatgcatataatgcagtcaaaagaacttggtacatgtcctgtccggcagattggaggctgctcttttttgtacatgagaattagcaatgtctatattgtgattgttgttagcagcaatgcaaatgttgcatgtgcattcaagtttgttgttgaggctgttacattattcaaatcatattttggtggtgcctttgatgaagatgccattcgtaataattttgttttgatttatgagctattggacgaaattatggacttcggttaccctcaaaatctttcacctgaaatcttgaaactctatattactcaggaaggtgttcggtcatccttctcatccaagcatgtagataagccagttccaaatgcaacattacaagttactggtgcggttggttggcgcagggagggtcttcattataagaagaatgaggtgtttctggatattgtggaaagtgttaatctccttatgtcttcaaaaggtagcgtcctccgttgtgatgtaactgggaaaattctcatgaaatgcttcctttctggaatgcctgatctgaagttgggattaaatgataaaattggtcttgagaaagagtcacagctcaagtcccgtcctgctaagagcggcaaaacgattgagcttgatgacgttactttccaccagtgtgtaaatttgacaagattcaactcagaaaagactgtcagctttgtgccgcctgatggtgaatttgaattgatgaagtaccgtattactgaaggagtaaatcttcctttccgggtattaccaactatcaaggaattaggtcgtacacgtatggaagtgaatgttaaggttaagagtgtgtttggtgcaaaaatgtttgctctgggagttgtcattaaaattcctgtgccaaagcaaactgcaaaaacaagcttccaggtgacatcagggagagcaaagtataatccagccattgactgtttggtgtggaaaataagaaaatttccggggcaaactgagtcaacattgagtgctgaggttgagttaatttcgacaattacagagaagaagtccttgactcggccgccaattcagatggaatttcaggttcccatgtttacagcatctggattgcgtgttcggtttctcaaggtgtgggagaagagtggctacaacacagttgaatgggttcgttacataactaaagctggttcatatgagataaggtgctaa

SEQ ID NO: 183 - protein, 438 aa, Nicotiana tabacum
MPVAASAIYFLNLRGDVLINRLYRDDVGGNMVDAFRMHIMQSKELGTCPVRQIGGCSFLYMRISNVYIVIVVSSNANVACAFKFVVEAVTLFKSYFGGAFDEDAIRNNFVLIYELLDEIMDFGYPQNLSPEILKLYITQEGVRSSFSSKHVDKPVPNATLQVTGAVGWRREGLHYKKNEVFLDIVESVNLLMSSKGSVLRCDVTGKILMKCFLSGMPDLKLGLNDKIGLEKESQLKSRPAKSGKTIELDDVTFHQCVNLTRFNSEKTVSFVPPDGEFELMKYRITEGVNLPFRVLPTIKELGRTRMEVNVKVKSVFGAKMFALGVVIKIPVPKQTAKTSFQVTSGRAKYNPAIDCLVWKIRKFPGQTESTLSAEVELISTITEKKSLTRPPIQMEFQVPMFTASGLRVRFLKVWEKSGYNTVEWVRYITKAGSYEIRC

SEQ ID NO: 184 - DNA, 1316 bp, Nicotiana tabacum
taaacaatattttttccggttttaaaaaaatattctcgctttttctttgtctatagaaaataaaaataattcgaggcatgatttatggatctcggagaactaagatttcttttccactttattctcttcaataaaaatgtcaacgagttctatacaaaactcaccaccaccaccattaacatattcttctccaccattagcaataattattgcattcattatttttgtattcctttttatagctcttttctcaattttcttttgtagatgcttcttacaaaatgtattatactcatggcatattactctagctggaattccaatttgtccaaccaaaaatattcaagggcttgatccattgattattcaatcatttccaacatttatctattcgagtgtacaagattatggagagggaaaatatgggattgaatgtgccatctgtttggtagaatttgtagatgatagtttccttcgtttgttaacatcatgtaaccatgtatttcatcaaggatgtattgaccattggcttgaattacacaaaacatgcccggtatgtcgcgcgagccttgactcgaaggaaatgcaacaaagggcagtccagagcactaaacttccacaacatatgaggtccagaaaagtgtcgaactgcattgaacctatgagtaattcaatgcatggcacttataacgaagaggagttgttagaacacacatgcagcataacaatcaaagatgatgacaacaacaatagcaacaacaacaacaataaagatgacgacgatgaaaaaggactcaatattagtgggaaatttgagaaactagcttcggaaacacttgaacgtattgagttacgagagaatgctgaaaaattctcgagatcacaatccacaggacactcgataatattggttagggaaagtgaagataggtttacattgggattacctgaacatgtgagggcaaaaattatgaagggacataacttgatgagaagttgcacaagttttgaagaattcaagaacaaaactaccactggaaattgttgttttggtgaaatttccgagttatccattgtttctgtagacaaaatataaaaatttccttattttttaattttattttataactagcttgtaaattttgtttataattttttaaagaaagataacataccacccctccttatgactctcctatagattgtttgttttgtttataaatttttaaagaaatactctttaaaaaattgttcaaatactctcctatatgtattcagaatttgcaccgtaatcaggggtgaagctatgttggccc

SEQ ID NO: 185 - DNA, 960 bp, Nicotiana tabacum
atgtcaacgagttctatacaaaactcaccaccaccaccattaacatattcttctccaccattagcaataattattgcattcattatttttgtattcctttttatagctcttttctcaattttcttttgtagatgcttcttacaaaatgtattatactcatggcatattactctagctggaattccaatttgtccaaccaaaaatattcaagggcttgatccattgattattcaatcatttccaacatttatctattcgagtgtacaagattatggagagggaaaatatgggattgaatgtgccatctgtttggtagaatttgtagatgatagtttccttcgtttgttaacatcatgtaaccatgtatttcatcaaggatgtattgaccattggcttgaattacacaaaacatgcccggtatgtcgcgcgagccttgactcgaaggaaatgcaacaaagggcagtccagagcactaaacttccacaacatatgaggtccagaaaagtgtcgaactgcattgaacctatgagtaattcaatgcatggcacttataacgaagaggagttgttagaacacacatgcagcataacaatcaaagatgatgacaacaacaatagcaacaacaacaacaataaagatgacgacgatgaaaaaggactcaatattagtgggaaatttgagaaactagcttcggaaacacttgaacgtattgagttacgagagaatgctgaaaaattctcgagatcacaatccacaggacactcgataatattggttagggaaagtgaagataggtttacattgggattacctgaacatgtgagggcaaaaattatgaagggacataacttgatgagaagttgcacaagttttgaagaattcaagaacaaaactaccactggaaattgttgttttggtgaaatttccgagttatccattgtttctgtagacaaaatataa

SEQ ID NO: 186 - protein, 319 aa, Nicotiana tabacum
MSTSSIQNSPPPPLTYSSPPLAIIIAFIIFVFLFIALFSIFFCRCFLQNVLYSWHITLAGIPICPTKNIQGLDPLIIQSFPTFIYSSVQDYGEGKYGIECAICLVEFVDDSFLRLLTSCNHVFHQGCIDHWLELHKTCPVCRASLDSKEMQQRAVQSTKLPQHMRSRKVSNCIEPMSNSMHGTYNEEELLEHTCSITIKDDDNNNSNNNNNKDDDDEKGLNISGKFEKLASETLERIELRENAEKFSRSQSTGHSIILVRESEDRFTLGLPEHVRAKIMKGHNLMRSCTSFEEFKNKTTTGNCCFGEISELSIVSVDKI

SEQ ID NO: 187 - DNA, 3445 bp, Nicotiana tabacum
acttttgagtgtgatattatatttaacaaaaaacaccaactgtccattattttccatcatttctcatcttctttgctcacaagcaaaaagccatggctacacaaatcaagaaaccattacctgcttgtgcaaaaataatagaagaaattacaaaaatttacaaatcactaccaacaagaccatcaatagtagaagttgaagcagcaaattctgtactaaaatcagtagaaactgaagaagaaattaaacttgaagaaatatccaagaaagtagaaccacaagatgttccaatagaattatactctgtattacaacaagtgagaaaatccatagttttgtttcaaagtcaagaacaaaagaaagagtcaattcagttaattgaacttgaaaaaacttatcagaattttgacgaacttattcagaaggcttctgagttggtttctgttgaggactcaattggtgaaattgaagaaaaagttgtgttcagtgatgaaaagagtgatagtttgaagggttttgttgcaatttctgaaaatactggtgtttcctcttcaggtttggatatttttccttttattgtttgtccaagattttaactttttgatttcttgttatttgtacttttttctgctgctatatgtttgaatttagagctaaaactagtatgaattgacagaactatgaatctaacatcttgtcaaacatatagttgctctcttcttcttcttttacttttttctttcccttttcttttattatagcggtatcattccgactagtttgtatgcacctcaactcttacacatagtacctactaggctactacatcctactagcacaagtaccggataactatatgtctttgtccaccgaggcggaagtagataggagaaatcacaaactcccttcgtcccaatttatgcggcggtatttgactcgacatgaagtttaaaaagaaggaaagacttttaaaacttgtagcggaaaacaaattatagatatttgtgtgactgtaaatcagttcattaagggtaaagttggaattttaaagataatttgtttccaaataaggaaatgtgacattcttcttgggaccgattaaaaagtaaagaacgtcacataaattaggatggatggagtaacatctttttgtctatgtcgggattcaaaccctggtttatagttaattccccttttcaattgatggtggtagcttgctatgtacctcgactaatctaccggactgccggatacagctcgtgagcataggtgtggttaaatctacgtgccaaagttggagcagataggctcatattgagtgttgtagccggtgattctagacttaatcttctgtgtctgccctccaataatagctaaacaaaaacaaataaaagagcaggttacttttatgactaacaacaataactacgcttcaatcccaagcaagttgaagtcagttatatgactagacaactaatatgaagtccaaatcttcaatctttagcaatttctgatgtttagttatggatttataactattagagagtaagcatgtggaagttttcaattcctatcttgagtacatgaagcttacataagttgcattattatatggcaagccttttgaacttttgcgataggtttgtgattaggggcggagctagagaccaaagtatggttcggtcgaacgcagtagctttgatctaaacactgtataatttgtcttaagaatccatttaatatatatacaactttttgatttagaaccccttaacttagaactgaactcataccgcctctatttgtaattcatactatgccctaattgttgtatgattttgcctacagggatcaagcacgcagagaagtacagttatttgaaagtggccgcactaattgaaaacgctgcgaaaactggagcaaaggttattgatcttcacaacaagttaatggacaagattgaatggcttcctatgtcattaggaaagttagtgaaagtcactgaactaaacttttctgataaccaaattatggctcttcccactacaattagtaaccttaaatccttaacgaaacttgatcttcactccaaccaaattataaaccttcctgattcattttgtgagctgctcaatttaactgatctcgacctccacgccaataggttgaaatcgctcccatcttctttcgggaacttaatcaatctgatcaatcttgatttgggttcaaaccggttcactcatttaccggatcttgttgggaacttaacctcattgaagagactaaacgtggaaacgaatgagctcgaagaacttccttacacgattggattctgctcttcacttgtagagttgagattggattttaataagcttaaagctcttcccgagactgtaggaatgctcgaacacttggagattcttacgctgcatatcaacagaattaaagggttaccaacgacaatgggcaatctctctcgcctgagggaacttgatgttagcttcaatgaagttgcaatcgtacctgaaacgttttgttttgctaccaaattggaaaagcttaatcttgctaacaatttcgcggacttgagaacattgccaagatcaatcgggaaccttgagaatcttgaagagatcgatatcagtaacagtcaaatacgaatgctccctgattccttcagattattgtcaaagttgaaaacttttcgagctgacgagactccactagaagtaccaccaaggcaaataataaagctaggagctcaggtttatcttaagcttaatttatattgctgtcaatgaattttggactttagatcagtagattttaactagtttatttttcttcttttttcttgccatcaggctgttgtagagtacatggctgattttgttgccaagaatgaatttcaatctcagcggccaaagaaaaggagaggtttattcgttggagttgccctttgttttggcagtgagaggaagaggcggatttagggcaggttcgttcggttcaactgaactcattttgttcagaccaaacacgggtacatgtctaagatcataatcattctgaacctacttactcttgatcttggattcgccttagtaagaggtgtcggataccttcaagattatcaaagcaatcagttttcacgactttttatgtatatatgtgagtaaaaagtttgtcttcttgagccgagggtctatcgaaaacagcatttctgtcccattggggtaggtgtaaggtctacgtacacactacactccccaaacctcacttgtgggattttactgggttgttgttgttgtatgtgaattaaaagtttgttctaagattatgaggctatatctatgttacttcatatttattgcaaaaatgtaaatactgtttttcagtatctgttgttatataattgttggtttgtgaaccattgttatgctac

SEQ ID NO: 188 - DNA, 1509 bp, Nicotiana tabacum
atggctacacaaatcaagaaaccattacctgcttgtgcaaaaataatagaagaaattacaaaaatttacaaatcactaccaacaagaccatcaatagtagaagttgaagcagcaaattctgtactaaaatcagtagaaactgaagaagaaattaaacttgaagaaatatccaagaaagtagaaccacaagatgttccaatagaattatactctgtattacaacaagtgagaaaatccatagttttgtttcaaagtcaagaacaaaagaaagagtcaattcagttaattgaacttgaaaaaacttatcagaattttgacgaacttattcagaaggcttctgagttggtttctgttgaggactcaattggtgaaattgaagaaaaagttgtgttcagtgatgaaaagagtgatagtttgaagggttttgttgcaatttctgaaaatactggtgtttcctcttcagggatcaagcacgcagagaagtacagttatttgaaagtggccgcactaattgaaaacgctgcgaaaactggagcaaaggttattgatcttcacaacaagttaatggacaagattgaatggcttcctatgtcattaggaaagttagtgaaagtcactgaactaaacttttctgataaccaaattatggctcttcccactacaattagtaaccttaaatccttaacgaaacttgatcttcactccaaccaaattataaaccttcctgattcattttgtgagctgctcaatttaactgatctcgacctccacgccaataggttgaaatcgctcccatcttctttcgggaacttaatcaatctgatcaatcttgatttgggttcaaaccggttcactcatttaccggatcttgttgggaacttaacctcattgaagagactaaacgtggaaacgaatgagctcgaagaacttccttacacgattggattctgctcttcacttgtagagttgagattggattttaataagcttaaagctcttcccgagactgtaggaatgctcgaacacttggagattcttacgctgcatatcaacagaattaaagggttaccaacgacaatgggcaatctctctcgcctgagggaacttgatgttagcttcaatgaagttgcaatcgtacctgaaacgttttgttttgctaccaaattggaaaagcttaatcttgctaacaatttcgcggacttgagaacattgccaagatcaatcgggaaccttgagaatcttgaagagatcgatatcagtaacagtcaaatacgaatgctccctgattccttcagattattgtcaaagttgaaaacttttcgagctgacgagactccactagaagtaccaccaaggcaaataataaagctaggagctcaggctgttgtagagtacatggctgattttgttgccaagaatgaatttcaatctcagcggccaaagaaaaggagaggtttattcgttggagttgccctttgttttggcagtgagaggaagaggcggatttag

SEQ ID NO: 189 - protein, 502 aa, Nicotiana tabacum
MATQIKKPLPACAKIIEEITKIYKSLPTRPSIVEVEAANSVLKSVETEEEIKLEEISKKVEPQDVPIELYSVLQQVRKSIVLFQSQEQKKESIQLIELEKTYQNFDELIQKASELVSVEDSIGEIEEKVVFSDEKSDSLKGFVAISENTGVSSSGIKHAEKYSYLKVAALIENAAKTGAKVIDLHNKLMDKIEWLPMSLGKLVKVTELNFSDNQIMALPTTISNLKSLTKLDLHSNQIINLPDSFCELLNLTDLDLHANRLKSLPSSFGNLINLINLDLGSNRFTHLPDLVGNLTSLKRLNVETNELEELPYTIGFCSSLVELRLDFNKLKALPETVGMLEHLEILTLHINRIKGLPTTMGNLSRLRELDVSFNEVAIVPETFCFATKLEKLNLANNFADLRTLPRSIGNLENLEEIDISNSQIRMLPDSFRLLSKLKTFRADETPLEVPPRQIIKLGAQAVVEYMADFVAKNEFQSQRPKKRRGLFVGVALCFGSERKRRI

SEQ ID NO: 190 - DNA, 4894 bp, Nicotiana tabacum
aaacattaatttcttccttttctttataaatacaagccaaattcacaacatagctagccattattcccaattgacatagaagtctcttgcctttttctttgatcaacttaaagggagtttcgcaagtttgtgaagacagattctcgtcactcaattttcagagctgagctaactgattcagtagtctcatggcgccggcttcattatgctgcatctccaacactgtctgtgttatggatgcctctagtcggctcggctcgagcttggttaagcggctacttgaaagaggcttcacagtccatgctgctattcaaaatcacggttagttctttaattattcacaaaacttaaaatttatattgttaatttgccttcttttgtgctcttcttgtttatggtatttggtctgttttctgtcagatgtcccggcctggaagtcctgtttgtttttggtactatagtggaccttttaaaataaaaacacgttacttctgccttaactacagttacattatttgtcaggtaatcatgagttgatgtcgttgccgccatgtgacaagaaaggattgaagatttttcagtcggacccttttgattaccatagtgtacttgatgctttgaagggttgttcttgtttgttttactcctttgagcctcccaaggaccactccaatgcttatgatgtacgttcacccttttcaccatttatttcctatcttaaacttttttatgtcatagaaaaattcaaaaaaatatttggtgtataaaagatttccatgaaagaggggtgtttaacacatttggtatacaaaaagtgttcgtgaaagaggagtgtgtactaacaccaagtgtgacgaacacttttggagtaaatcacctttatttactttctttattttcggcaaagacctactagagactgtttcgataagatcacttaattctctttttactttaatgcataacaataatcagcgtccccaagcgccttttatcaaaaaaaaaaaaaaagaacatggatttgactaccagttcggagtgtagactatgtattaagcgttcattttattgttataagttgattattcatattaattcttgattaattatgtgagtgcatgttcttatctagtactatatggaattgcgtaaagatatgttatgcaatcccaaagattgattaggaaagatgtgacgtccttttgttgtgaggagttgcccatgcaatggttttggccctataaggataaagagcaagtcaaaaccaaattgacctaatcaaacaaattaaaaattatccacaacattaaattgtaatgatactgatcaataatgtctaaagtatgttgaacacgtcaagaaatttccttagaccttgtagctaaagttggtttaccaatacaggaaatcgtcctagtttagttaagctaataataaataataaagaattttttatacggttagtaaatttttaatttgtcataacacgtaagttattatttttattaaattatcatttaatacttatttaatatttacttatagctatcttatatatatgatctaattatgtaaatgttttaacatcattaatgcataaaattaaagatagtcgagcgtatttcatttttatacccgcggcatttattattctcgaatatttatattcttaaaattcttttattgcatattgttttttgtacttcagttatcatattatcttcttgttgttactgttcttttttttcatggcttctccgccactgtatttttttcataaactgttgtattcatgcttttcttgagccgaggatctatcgaaagtaatttctctacccttcataatgtagggataaaatctgcatacatactatcctttccggaactcaattataaaattagaatatgttattatagttgtggtatacataaaattaaaactatgtgaataatttgcaggaatatatggcagaagtagaagttagggcagcacataatgtattggaagcatgtgcacaaactgaaaccatagaaaaagttgtattcacttcctcagcaactgcaattatttggggacatgatcataaaaaatctgcatcctttgatcttgatgaaaggcattggagtgacatcaacttttgtcgtaaattcaaggtatgtcaacattttaaattattactacattcttatattgttactcttggttaaaaaaaaaattctttcttttctttcataaaaatgaaggatagttttggagcaacgataaaattatttttgtgtgacctacaactttatatatttgaactgtgaaatcagttactgacacttacattagaatagactgcctacatctctaatcccttgaagtgtgacacttttttggacactaaataaatgcagaatacttcatgcattacactgagctttctgccatcaaccttttacagtccgcttcctttatcaatattcgaacttcagctttgtatgtgttcttcaccggcgcttgccaaacagggacgaatttatagggtagactatgagacacctgaacacatgatctctttatatcagactaggtatatcatgtatatatttttttagaatttgtctaatattatctgttgcaacaagggtgaactcaggattcttagaggatggaatgataggttcaccactagtttgatagtatatataaaaaaaaagcatagagaagttcaccaaggaactatccctggtccctagggaagctacttaaccagtgaacaaaaaacaacaaatttaaccatgggttcataaaagtagtatttacacaaattatatgaattatacatacaatagatacattctttgtcgaagaccacgggttcgtgaaccctttggtacgtagtctgtaaatccgcccctgttggcactcatgctacaaaaaagactgaatgatgcacttggttgaatactgaattatttatcctaagaacatcgatcgattcctatttaatactttttctctcatttctttaatggtgcacccatgttctaaaaattctagattcgcctcgtcgccagatgtattactcatgcttaatttatttcatggatacagttatggcatgctttagcaaaaacattagcagagaaaacagcatgggcattggcaatggacagaggtttaaacatggtgtcaatcaactcaggattgttaattagtcctgatttaaacatcacaaatccttatttaaatggagctgcagagatgtatgaagctggagtttttgtaactgttgatcttgatttcttagtggattctcacatttgtgtttatgaagatatctcaacttatggcagatatttgtgctttaatcacatcattaataccacagaagatgcttttaagcttgctgaaaaattgttccctttgccttcctccccttcaaggtacgaacttcgtcgctagtctatcactaaatcactcgtaactaacaaaattttgtgatgatctgtcgctaatccttcattaaataggattaacgacagttttttctgtttagttacataatttatccgactctaattcctactttcttagtaaattaaacccactaatgaatatttagttattgtattttaatgttggtagtaggtctttaacttgctttattttcttggttagtatgtaatttcattttatgcatggttatggataattatttgttaggtgatctcataatatatatcttgtttttctctccaaaaaatcataaaatctgcaagtgtatcaataagatttaaataaatctcacaataaatattgtagatttacgccagaaattgtgttttttaaaactatgttaaaaatccaatactttttgggtggagttaggttggggaaaaacactgaatatagaagagatgagatgacagaaaagagaatattaattatttgtcatattatccgaaggggagccttagcgcaactggtaaagttattgtcatgtgatcaggagatcacgggtttgtgctgtgaaaacaacatcttgcagaaatgcagggtaaagttgcgtataataaacccttatggtactatccttccccggaccccatacataatgggagcttagagggtgtttggctaagcttataagctggtcaaactggcttataagcactttttgacttatctacgcttttggtaaaattaaaagtgcttataagttaagtgcttataagacaaaaataagccaaaagccataagttggtctcccccaactaatcaaatttcaacttataagaactttaggttagagcaaaatatttactattctattcctaaaataattctttttaaacaaaactctccgtatatccaattcttcacctgcttattattaatttcaacacttttatcctaacacgtaactgcttattttttaaatcagtttcagtatttaaaagtgcttttcagcacctaatgcttatcaactacttaaatcagctaagccaaacaggctcttagtgtatcgggttgtcttttattagtattcattttaaggacatggattattacgactattttttttccttattcctgtttttgatttgatagttttgagaaggatacaaggataatccagcagaggataagcaacaagaaattgaacaaactcatggttgattttagaagatcagagaaagacctcttgaaaaatcaataagattaattgtcctttggacatgtcctaaggtcattcaatttgacagcaatatttaagtgtttaatttatatatacagtctgtataaacaagctttacagcattaagttacttttttcctgttgtaacagatgatatattttattttcaaatttacaaaattttatattttaaagagacttaccaa

SEQ ID NO: 191 - DNA, 930 bp, Nicotiana tabacum
atggcgccggcttcattatgctgcatctccaacactgtctgtgttatggatgcctctagtcggctcggctcgagcttggttaagcggctacttgaaagaggcttcacagtccatgctgctattcaaaatcacggtaatcatgagttgatgtcgttgccgccatgtgacaagaaaggattgaagatttttcagtcggacccttttgattaccatagtgtacttgatgctttgaagggttgttcttgtttgttttactcctttgagcctcccaaggaccactccaatgcttatgatgaatatatggcagaagtagaagttagggcagcacataatgtattggaagcatgtgcacaaactgaaaccatagaaaaagttgtattcacttcctcagcaactgcaattatttggggacatgatcataaaaaatctgcatcctttgatcttgatgaaaggcattggagtgacatcaacttttgtcgtaaattcaagttatggcatgctttagcaaaaacattagcagagaaaacagcatgggcattggcaatggacagaggtttaaacatggtgtcaatcaactcaggattgttaattagtcctgatttaaacatcacaaatccttatttaaatggagctgcagagatgtatgaagctggagtttttgtaactgttgatcttgatttcttagtggattctcacatttgtgtttatgaagatatctcaacttatggcagatatttgtgctttaatcacatcattaataccacagaagatgcttttaagcttgctgaaaaattgttccctttgccttcctccccttcaagttttgagaaggatacaaggataatccagcagaggataagcaacaagaaattgaacaaactcatggttgattttagaagatcagagaaagacctcttgaaaaatcaataa

SEQ ID NO: 192 - protein, 309 aa, Nicotiana tabacum
MAPASLCCISNTVCVMDASSRLGSSLVKRLLERGFTVHAAIQNHGNHELMSLPPCDKKGLKIFQSDPFDYHSVLDALKGCSCLFYSFEPPKDHSNAYDEYMAEVEVRAAHNVLEACAQTETIEKVVFTSSATAIIWGHDHKKSASFDLDERHWSDINFCRKFKLWHALAKTLAEKTAWALAMDRGLNMVSINSGLLISPDLNITNPYLNGAAEMYEAGVFVTVDLDFLVDSHICVYEDISTYGRYLCFNHIINTTEDAFKLAEKLFPLPSSPSSFEKDTRIIQQRISNKKLNKLMVDFRRSEKDLLKNQ

SEQ ID NO: 193 - DNA, 5467 bp, Nicotiana tabacum
atgacatcaaacccatataaccttccaaatatatgccgtataacatccattgtatccttcactttcttacctgcaactttaacgcccagaaaaacaatcatcaaaacaaggcgataatcactaacctgtaagtttatacgtagtttgattgtgttatttcatatgaattccatcaattttataacaaaaaaaatcttgaaaaattcgatcttttatttgtttgtttaagttttgtgttttccattttggggtttcagtttaaattttggtatagctcatgaaattctcagctgggtttaaaagaaaagtataccgattatctaaatttatattaattccatcaattggtcaaaaaaaaatctgaaaatttcaatctgttttaacaacctttgtgttttcctttttttttttccaggttcattttggattttagtgtagttctttaaatttcctaaaaatgggttctaaagagaagtatacaagaaccaatagaagaccaagatcagtaaaaactgaacatgatcataatacccataacatcagtaatggtaattctgtattttctgaatctgggcttagcccattgggcccaattaagcccaatgcagatgggggtgatgagagtggttggggttactgtactgaggaacaattagaagaaatcttgttacaaaatttggagattttgtatagtgaagctattaataagcttattggtttaggttatgatgaagatgtggctatgaaagctatattgaaaaatggacattgttatggtggaatggatgttttgactaatatattgcacaactcgttgtcgtatttaaataacgggagtagtgtttcgaaattggaggattcagagcattgttttgttgatttgaggcagttggaagaatattcgttggcgggtatggtttgcttgttgcagcaagttaagccacatttgagtaaaggggacgcgatgtggtgtttgttaatgagtgatcttcacgtaggtcgggtgagcgtgatggaaattcctgctccaagtaatgggaatggttgtgttaatgggtcggtgagtgggagtggtaatgttgagggtgttggcatgggtcctgttggggttgtgcccgctatgtgtaggtttcatggtggttggggttttgggagtggtggtgctaataatgcgtttccgttgaataggtcattcgggtatgctgtctcggattctaattcgcaaaaagagattgagtgtccgaagaggtttaatcttactccttcgatgaaaactttgctgaagaggaatgtagctgcatttgctgcgggatttaggtcaaacccgaaatatatgcagaatcagtcacaggcttgtcctagttctttggctgatggggatcaatcacgtggaagtgaatcaggggttgaaagtggacttgaacagtcgggggactcccaagcttcgaaaagccaagatgtggttaactctgtcgtaggtaaatttcgtgatttgaatcttgacgggaatacagagaagggaaatgggcagctggaccagaaagatgagatgattctaagtttgatcgatcaaataaaggatcttgagaagcaggtcaaggaacggaaagattgggcgcaccaaaaagcaatgcaagctgcaaggaagcttagcaatgacttgacggagcttaagacgttgaggatggaaagagaggatacccaaagattaaagaagggtaaacaagcttccgaagatactaccatgaagaggctagcagaaatggagaatgctctaagaaaagccagcggccaagttgaccgtgcaaacttggctgtaaaaaagcttgagaatgagaatgcagaaatcagggcagagatggaggcttctaagttaagcgcatcagaatctgcaaaaacatgtatggaggctgctaagagagagaagaagtgcattaagaagcttggagtttgggagaaacagaaaaagaagctgcaggaggatattgcagcagagaaacaaaagatttcagatgtacaaaagcagctggttcaggtagaggcagctcaaaaggaagctgaggtttgctctttcttctcttttttcccttgatgtttacttgttattggtgatcttgcaatggaaatgcaaacaattctgttcgacattttacatcactcaatgagaatcggtttaagattcttgtgtccttctcatgttaggatgccctctttgcatccaagttagttattaggtgcataccgttggtgcttcataaaggcttaagtcattattgtaagcattttttgtgctggcctcagatatttccgttcttccgtagaaaacttttgcctactgggttcacgaggtacctgaatggttagaatatatagacattacatcagaatttagcttgttgagagaagatgtgtcatgtattaagttttattttggatcttatatttctttttctctctcacgttcttgttgataagggagttgtattttcgttgtgaaatctctccctatgtggcctttgcaaaccataaccagtcctaagtcacaattatcttaactcttagagtgcccccaaactacttttgcctgtgttcaaccatagctagttttaagtcgggataaagggagaggattgtggtatgttgacatcccgcttaaaattagacctattatatatttacgaaaaaggtctaaaattatgtgaggaatttgcatccaagggtgtgacctagtggtcaatgaagtgggttagaactatgaaacctcaggttcagttcccagcacagacaaaaaacactaggtgatttcttttcatctgtttggtagatagagttacctggtacctgttgctggtggaagtaacaggtatcccgtggaattagttgaggtgcgcgcaagctggtcccggcaccacagtcataaaaagagaaaattatgtgaggaatgtgatcataccaccacttcccattagaactccaaacttaagcatgcctggacgagatagtactaggatgagtgatttccagggaagtccttgtgttgtataacttgctgacccagtgttgtaaatagcgagcgctacagcgctaaaagcgtgtagcgacgcgaggcgagacagtgttgccattctgggttgttgcgatgcgaagaagaaaaagcaagcgcctctgcctgtgtagcgagaggcgctgcgaggcgtcactattcgaaaataacggaagaaaaggcagctatttttactaaaacacaaaattagggcttgggtttcacttcttacaagcagcgatcacttcttctccttcagcgacaaaattagggcttgggtttcacatcttcttcttcttctcccatcatcagccattagcgaccacttcgggtatgtaactttcttttcttttcttcttcttctcctttcttcttcttcggtgatcggctctttcagctctggttttcttcttctgtctttgctctatttttcttcttctttcttgctctgtttttcttcttctttctttgctctgtttttcttcttctttctttgctctgtttctcgaccggagcttaattttttttttttgggttctgtttttggacattgaccagaggcagagcagaggcagtaaccctttttttttgtttgctctgagcagaggcagtaaccctttctttttgtttgctctgttttttcaattatagacttatagttattgagtttttagttatatgtatataatattttatgtttttgtataaattgtcgtttcacatcaaaaaggcgagcgcttcgctgcgcgcctctcgcctcagtgaagctggccctcatcgatatttgtcgccgcacactatccaaaacactgtgctgaccccaactagttgagattgacgcatgcgtgcttggcaagattactactagaatgggtgatcctgaagtcaccttgttgtattccatgtggacccaaactagttggaattgaggagtagttgattgctaaaaacgacagcccggtgtacaaggcatcccgcgttcatgcagggtcggggaaaggctgcactccaagggttgtgatgtatgcagcctaccctaacacaaacgttagtggcggattctacggctcaaacccgtgacttacaggtcacacggagacaattttaccgttgttccaaggcatccgcttcttgattgatactctaaactgatatagacatataaatagctattctcctgtttcatgacaaatatattcatctcccaaagacgagatagttttacttgtgtggtagacttcctgaaattatcttctgaagttcaaatattcaatggattttgcagatcatcagaaaccttatgttttccttttttccaacagtaaattgtaagctatagctatttatcactatgaaattgaataataaaaatatggtgttttatggtagaagcttcagtttcttttgacacatcaatcggcaacctcagttttattttgtaagagtggatgtgtctatttgttttgaaagactcgtttgttcattcatgttcagaaacatttaaaagcatagatatccattcttatctgaagaggggaaataggatgaaaagaaatgtgcttcgattcattttcattttgcctgaattcttgccactgtattcctttaattgttgaacaatagcaagtttctttaattgctcaaaatttgtcaattcgttatgttatcaatttttatcaggcaaagtggaggcaggaacagaaggctaaggagcaagccgtggcacaagtagaggaagaacaacgtctcaaagaagcagccgaggctactaacaaaagaaagcttgaggcgttgcggctgaagatagaaatagacttccagcggcacaaggatgacctccaacggcttgaacaggatctttctcggcttaaagcgtctactgagctgcagaatcagtctgctaatttagcaacaggtaactctaacggtgaacagccccacgctgatattgcaaggatgttacatgagttggacagattggagaattcttccgagaagggtagctccgatagggagtgtttaatttgcaagaaggatgaagtttcaattgtcttcctaccttgcgctcatcaagttatgtgcgcgaattgtaatgacaaagggaagaagggtagggctaaatgtccgtgctgtggtgttccaattgaacagaggatcagggtctttggtgcaacctcataggcctcatcccaaatgctcataaattatcttttggaggtttagacaatattcaagttactgtattgtcttaaacatatgcttatgcttgattgagtcagcataataaataaacagctgccaagttggtgtattttgctgcaatgatgtttgcttattagaggtcttaacaaatgtccttttctctttaagatgtggttctcatcttagaatttatctaggctggaatgtggatactatgtacca

SEQ ID NO: 194 - DNA, 2106 bp, Nicotiana tabacum
atgggttctaaagagaagtatacaagaaccaatagaagaccaagatcagtaaaaactgaacatgatcataatacccataacatcagtaatggtaattctgtattttctgaatctgggcttagcccattgggcccaattaagcccaatgcagatgggggtgatgagagtggttggggttactgtactgaggaacaattagaagaaatcttgttacaaaatttggagattttgtatagtgaagctattaataagcttattggtttaggttatgatgaagatgtggctatgaaagctatattgaaaaatggacattgttatggtggaatggatgttttgactaatatattgcacaactcgttgtcgtatttaaataacgggagtagtgtttcgaaattggaggattcagagcattgttttgttgatttgaggcagttggaagaatattcgttggcgggtatggtttgcttgttgcagcaagttaagccacatttgagtaaaggggacgcgatgtggtgtttgttaatgagtgatcttcacgtaggtcgggtgagcgtgatggaaattcctgctccaagtaatgggaatggttgtgttaatgggtcggtgagtgggagtggtaatgttgagggtgttggcatgggtcctgttggggttgtgcccgctatgtgtaggtttcatggtggttggggttttgggagtggtggtgctaataatgcgtttccgttgaataggtcattcgggtatgctgtctcggattctaattcgcaaaaagagattgagtgtccgaagaggtttaatcttactccttcgatgaaaactttgctgaagaggaatgtagctgcatttgctgcgggatttaggtcaaacccgaaatatatgcagaatcagtcacaggcttgtcctagttctttggctgatggggatcaatcacgtggaagtgaatcaggggttgaaagtggacttgaacagtcgggggactcccaagcttcgaaaagccaagatgtggttaactctgtcgtaggtaaatttcgtgatttgaatcttgacgggaatacagagaagggaaatgggcagctggaccagaaagatgagatgattctaagtttgatcgatcaaataaaggatcttgagaagcaggtcaaggaacggaaagattgggcgcaccaaaaagcaatgcaagctgcaaggaagcttagcaatgacttgacggagcttaagacgttgaggatggaaagagaggatacccaaagattaaagaagggtaaacaagcttccgaagatactaccatgaagaggctagcagaaatggagaatgctctaagaaaagccagcggccaagttgaccgtgcaaacttggctgtaaaaaagcttgagaatgagaatgcagaaatcagggcagagatggaggcttctaagttaagcgcatcagaatctgcaaaaacatgtatggaggctgctaagagagagaagaagtgcattaagaagcttggagtttgggagaaacagaaaaagaagctgcaggaggatattgcagcagagaaacaaaagatttcagatgtacaaaagcagctggttcaggtagaggcagctcaaaaggaagctgaggcaaagtggaggcaggaacagaaggctaaggagcaagccgtggcacaagtagaggaagaacaacgtctcaaagaagcagccgaggctactaacaaaagaaagcttgaggcgttgcggctgaagatagaaatagacttccagcggcacaaggatgacctccaacggcttgaacaggatctttctcggcttaaagcgtctactgagctgcagaatcagtctgctaatttagcaacaggtaactctaacggtgaacagccccacgctgatattgcaaggatgttacatgagttggacagattggagaattcttccgagaagggtagctccgatagggagtgtttaatttgcaagaaggatgaagtttcaattgtcttcctaccttgcgctcatcaagttatgtgcgcgaattgtaatgacaaagggaagaagggtagggctaaatgtccgtgctgtggtgttccaattgaacagaggatcagggtctttggtgcaacctcatag

SEQ ID NO: 195 - protein, 701 aa, Nicotiana tabacum
MGSKEKYTRTNRRPRSVKTEHDHNTHNISNGNSVFSESGLSPLGPIKPNADGGDESGWGYCTEEQLEEILLQNLEILYSEAINKLIGLGYDEDVAMKAILKNGHCYGGMDVLTNILHNSLSYLNNGSSVSKLEDSEHCFVDLRQLEEYSLAGMVCLLQQVKPHLSKGDAMWCLLMSDLHVGRVSVMEIPAPSNGNGCVNGSVSGSGNVEGVGMGPVGVVPAMCRFHGGWGFGSGGANNAFPLNRSFGYAVSDSNSQKEIECPKRFNLTPSMKTLLKRNVAAFAAGFRSNPKYMQNQSQACPSSLADGDQSRGSESGVESGLEQSGDSQASKSQDVVNSVVGKFRDLNLDGNTEKGNGQLDQKDEMILSLIDQIKDLEKQVKERKDWAHQKAMQAARKLSNDLTELKTLRMEREDTQRLKKGKQASEDTTMKRLAEMENALRKASGQVDRANLAVKKLENENAEIRAEMEASKLSASESAKTCMEAAKREKKCIKKLGVWEKQKKKLQEDIAAEKQKISDVQKQLVQVEAAQKEAEAKWRQEQKAKEQAVAQVEEEQRLKEAAEATNKRKLEALRLKIEIDFQRHKDDLQRLEQDLSRLKASTELQNQSANLATGNSNGEQPHADIARMLHELDRLENSSEKGSSDRECLICKKDEVSIVFLPCAHQVMCANCNDKGKKGRAKCPCCGVPIEQRIRVFGATS

SEQ ID NO: 196 - DNA, 5361 bp, Nicotiana tabacum
atagcctttcaagaaaatatagcctcaatttttttatatttttgcatggcctagccattttttaactgaagaaaatacgaaatctccacttattttcttatcaatattcaccaatatgggagtggaaatggaggtgagtggagataataatactaattgggtaccaattatgaagaaaagaatgaatattcttgggaaaaaaatgaaaaattttccaaaaataacatggaaaacaatttggaaagttggcaaagatgatccaagaagagttattcattcactcaaagttggtttttctttgacattggtttcattgttatatttaatggagccattgttcaaaggttttggaagtagtgctatttgggccgtcatgactgtggttgttgttcttgaattcacagcaggtaaagtttttttcctttttcttttacgttagagtttaacttatatataccgacaacagtggcgaagctgctcaatgaagggattcaattgattcccttttatcgaaaaactatgctcgcaaattgagtaacaactttttcttgcatgtatataaggttttgaatccccttggcatcagtggcgatgccacatggtcattgaccacccttcattgaaaaattacattatgtacataagtaaaatatcacgtttttgaagtatataatatattttgaacatcctttgtcgggaatgtttttcactttttttaaatttgaacatccttggagaaatttctagctttgccactgcttgacatatgaaaaacttttaatttatcaacagggggttcaaaaattaaaataaaagttacacgtcggaatcctagttatgacattcttgcatttttctgaatccttttattaagattcctagctccgccactaaatgacaatgtaaagaattttcatactatctgtttatttgaatctgttgtagaaagtaatctgatgaatgccttagttttcaggttactaacctcgcttattatagacgtatgattacctatagttatctttcaggtgaattgataatataaaaaatctttttcgtgtacttcctaatatttttctcttatttttaaatgataggggcaacattatgcaaaggtttaaatagaggattgggaacactattagcaggatcattggcattcttgattgaatacgttgccacagaatctggccacatatttcgagcaatattcattggagcctcagtttttttcattggtaagtttcatgttattatatcaagtttgatataaagagttatttattctctatatttggattttccttggttccaactactatttataacatcactaaaggttgtggcggggtgaaaagtatacccctctatccttaactagagatctcaggcatggcggaatcacattcaaccgaggggtgtcaaccgacactccttcatggaaaaattacactgtattgctagataaaaaattaattttatgtatactatacattgaatccctttcattttacagcgtatttaaaattttatattttgataccctttagtgaaaattttggctccgccactaatctcaagttcgaactctcggaatggaattgcctttggtagggaggctttaccaccaaaaagtggacttcccattacgaatatagattagtcaggtttcgaagctaataccaaacatcgggtgaaaaacaagaaaacactaatattaatattgaggcatttgctcatgactaattgttatttgattattttcaatttttacaggagctgcagctacgtacatgaggtttttcccctacataaagaaaaattatgactatggtgtggtcatatttctcttgacgttcaacttgatcacagtatcaagctatcgtgttgataacgtgttaagaattgcgcacgagcgcttctatactatagctattggttgtggtatatgtcttctcatgagcctattgatacttccaaattggtcaggagaagaccttcataatttcactgctgctaaatttgaaggcttagcaaaatctattgaaggtatggccaaatttagaaaaggaacaagcgcaatgtattttcattttcttatatatatatatatatatatatatatatatatatatatatatattatatatatatatatatatatatatatatatatatatatatatatatatatatatatatatatatatatatatatatatatatatatatatatatatatatatatatatttgttcttgaaatagctcgtaaatatattgtcagtgtaatttaacctataaaaggaggttgtctatcttattttttggattactaattttacttattattatgagcagttacctataattatttttgtgcaaattatttttacactatcagttgtgagaagtcaaacgagtcttaattttttttctcatattctgtattagcaagtgctttatatgtctctctcgtgggcgcgacacacacacatagactagtgacgaagccataaatttcatttaggatgttcaaacttgaaataagtaaaaaaattctcaataaattaaagggtgttctatagtatatgttatattaaaatctaatattttacctttatatgttagtgtaacttttcgacgaacttaaggctatatatgtaccttcgcccctgattcacacacacacacacacacatatatatatatatatatatatatatatatatatatatatatatataatatatatatatatatatatatatatatatatatatatatatatatatatatatatatatatatatatatatatattatatatatatatatatatataaaatttatttttatttgatgccatatatataattcattgatataggaaattaatgagtactttcaatttaatgtgcagcttgtgttagtgagtatttcagagatgaggaacaacaaaaagcaagagaaaattcgtcagatttggaggatcctatatacaatggttataagactgttttggattctaaatcattcgatgagaccctggtaagtagttgaattttctctcaaaaaattcactaaatgtatatgtaataatattctaaaagaaataacatgtatatatatatatatataatggatttataatttatatataaatgacagtgcagaaaaaaatttcgatgcattttatcctgctatagcaagtaagatagctttattctctaggttactaaatactaatcacacttataagttataatgtatagttatttgtaaatatattttaggcaatttgatagtgcaagaattattttacacagtcagtttatagaaggtgtatcatgtattcatatataataaacccaaaagcgccttgaaaatagtacgagataaacgtcaatttgagacaataagtaaaaccttaattagaatatatgttgctaggactcgggtgcgaaagctgatccgggtgtatatttagaggtcgggatccttcataatctagattttaagatttggggatatggttcaaggtatggatacgggtacaaaaatttaaaattttaaaaatagatatacataaattatccaaaattatgagttattatgtggaaaacttatatgttgtgaagtgcagccactaatcaatctttcattctgagaatttttcaagttgtacgcactaggcactagcagacaacaactaaaattcactctttcattctttatttttcatcatatttgtctatggattatggtcatagtacccgatctcgattgatcacacctgataagagtctcgtaccgttaccaataccagtgtcgtgtggacaccgacggctaaaatgaacaattcgcgtaacataaattctaccctacatatctagacccaaattaacatagtagttgaatggatactattcatgtaaaattctgcgtacgctactgtctgtatataaccaaaattaatctgagtggaacaggcattatacgcgagttgggagccaaggcattcgagacattgttacagatttccatggcagcaatatgttaaattggggaatgttcttcgccattttggatacacaattgtagctctacatggatgtctccaaactgaaattcaggtacaattttcttgggatctttacacaaatactcgatcagatttactgtttaattttcataatcgttatacatagactatatactgattatataacagtcctacacatgttaattatgcatatattatatatccatcccagttatttttagtccaggaggttgacttgacgactatttaagttaattcttcaactttcttcctccacacgtaaagttctttttcacgatcagtgtacgaagtaataacttataataatatgttaatagtattatttttatttattaccaatgaatacttatgtgacctaattttctaaatattatttctactaatgcatagaacttaaactcttaattgaatttttattcagacgcctcgatcggttcgagcaatgttcaaagatccatgtatcagactagctggagaagttacaaaagctttaaaagaattaggagatagtataagatatcgtcgtcaatgttcaccagaaatactatccgatcacctccacgaagctttacaagacctagataatgccataaaatcccaaccaaaactcttcattgggtccaaaaataattccaacaagttagccctagcaacaatcggcatacagtcaggtgcactgaactcccggagggtcactttatcgagcgtaaagaccgatacgtccgcgttgctcgagtggaaatccaaaaggggtagcactaatgaaaataatgagagaaaatctttgaggcctacattgagtaagattgctattactagtcttgaattttcggatgctttgccatttgctgcatttgctgctttattagttgaaattgttgcaaggcttgatcttgttattgaagaagttgaagaattgggaagaattgctcatttcaaagagtataataattctcaagatgatgatcataatgttgttgtggatattgaaaaacatgcaatgcctttgagaaatgaattgccaacccatgcaggagattaaaacgttctttggcgtcgagggaattgcacgaatagaaattcaaaaaagaatcgatctgattcaggttataatctttatggaattcccgaaattattactagaaagtcaaccacgcagatcgacaatatgatgtggtttgaaaaaaatgaggaagaaactatagagaaaaaatctatggttttatagttgatatctattgattagagaaatgcactaaaggacgtgtttgtgat

SEQ ID NO: 197 - DNA, 1599 bp, Nicotiana tabacum
atgggagtggaaatggaggtgagtggagataataatactaattgggtaccaattatgaagaaaagaatgaatattcttgggaaaaaaatgaaaaattttccaaaaataacatggaaaacaatttggaaagttggcaaagatgatccaagaagagttattcattcactcaaagttggtttttctttgacattggtttcattgttatatttaatggagccattgttcaaaggttttggaagtagtgctatttgggccgtcatgactgtggttgttgttcttgaattcacagcaggggcaacattatgcaaaggtttaaatagaggattgggaacactattagcaggatcattggcattcttgattgaatacgttgccacagaatctggccacatatttcgagcaatattcattggagcctcagtttttttcattggagctgcagctacgtacatgaggtttttcccctacataaagaaaaattatgactatggtgtggtcatatttctcttgacgttcaacttgatcacagtatcaagctatcgtgttgataacgtgttaagaattgcgcacgagcgcttctatactatagctattggttgtggtatatgtcttctcatgagcctattgatacttccaaattggtcaggagaagaccttcataatttcactgctgctaaatttgaaggcttagcaaaatctattgaagcttgtgttagtgagtatttcagagatgaggaacaacaaaaagcaagagaaaattcgtcagatttggaggatcctatatacaatggttataagactgttttggattctaaatcattcgatgagaccctggcattatacgcgagttgggagccaaggcattcgagacattgttacagatttccatggcagcaatatgttaaattggggaatgttcttcgccattttggatacacaattgtagctctacatggatgtctccaaactgaaattcagacgcctcgatcggttcgagcaatgttcaaagatccatgtatcagactagctggagaagttacaaaagctttaaaagaattaggagatagtataagatatcgtcgtcaatgttcaccagaaatactatccgatcacctccacgaagctttacaagacctagataatgccataaaatcccaaccaaaactcttcattgggtccaaaaataattccaacaagttagccctagcaacaatcggcatacagtcaggtgcactgaactcccggagggtcactttatcgagcgtaaagaccgatacgtccgcgttgctcgagtggaaatccaaaaggggtagcactaatgaaaataatgagagaaaatctttgaggcctacattgagtaagattgctattactagtcttgaattttcggatgctttgccatttgctgcatttgctgctttattagttgaaattgttgcaaggcttgatcttgttattgaagaagttgaagaattgggaagaattgctcatttcaaagagtataataattctcaagatgatgatcataatgttgttgtggatattgaaaaacatgcaatgcctttgagaaatgaattgccaacccatgcaggagattaa

SEQ ID NO: 198 - protein, 532 aa, Nicotiana tabacum
MGVEMEVSGDNNTNWVPIMKKRMNILGKKMKNFPKITWKTIWKVGKDDPRRVIHSLKVGFSLTLVSLLYLMEPLFKGFGSSAIWAVMTVVVVLEFTAGATLCKGLNRGLGTLLAGSLAFLIEYVATESGHIFRAIFIGASVFFIGAAATYMRFFPYIKKNYDYGVVIFLLTFNLITVSSYRVDNVLRIAHERFYTIAIGCGICLLMSLLILPNWSGEDLHNFTAAKFEGLAKSIEACVSEYFRDEEQQKARENSSDLEDPIYNGYKTVLDSKSFDETLALYASWEPRHSRHCYRFPWQQYVKLGNVLRHFGYTIVALHGCLQTEIQTPRSVRAMFKDPCIRLAGEVTKALKELGDSIRYRRQCSPEILSDHLHEALQDLDNAIKSQPKLFIGSKNNSNKLALATIGIQSGALNSRRVTLSSVKTDTSALLEWKSKRGSTNENNERKSLRPTLSKIAITSLEFSDALPFAAFAALLVEIVARLDLVIEEVEELGRIAHFKEYNNSQDDDHNVVVDIEKHAMPLRNELPTHAGD

SEQ ID NO: 199 - DNA, 5133 bp, Nicotiana tabacum
ggatgatagttagaatgaacgaagaatccaagtaaaccccaagtaattctaatcagattaaaaaaaaaaaaaaaaaaaagtccaagtaatttcgagacaagctttcctaattccaagtaaattgagttgtctcagttttggaataagtttaaaagttggaatctgaccgcaaaccccaaacgccaagctgatatttcaatggcttctgctttggcaccaatcttctctactaaatcaacttctgtatctgtatcctcatctctctcaacaccaacaagaatttctactaaatcaacctctgtatctgtatactcatctctctcaacaccaacaagaattaaccagaaaaatcctaaagttagagtctttactaaacctaaattaaatccaatttcagcattttcagacccatatgttctccaaatagctgaaacccttgaagactctttaccttccttatcttccccaccacttcagaaattaagggaaacttcctcagaaaccctactttcaaccccttggccttctcgtaaagatgaaccttttagattcactgacacttcattcttgaaaaattcaagaattgaaccaattttgcctccaaagattcagagttcttctttggatgtattttcagatacccttttgcctacaatttcgattcttgatggttatattatgaatgaattgtctcagttaaaagaattggctagtggtgtttatgttggtagtcttttgagtgtgaaatctgaggccatattgaaaagggtgtctgagtatgaatctgattttaagggtgatttgttttggtcacttaatggtgttggtacccctgatgtattactagtgtatgtgccagaagggtgtaaagttgagaatacattggttttgaggtacatttcaggtgagagtagcgataagggatcaaaagctttgcccttttcgaatccgagggtgttggtgttggtggaaaagggaggggagattagtatagttgaggagtatgtaggtggagaaaaagataaatgttactggtcaaattctgttatagaagtggttgttggtgaaggggcaaaagtgagccattcttacctccaaaatcaatctttaaatgctgcacatatcaagtggacttgggttcagcaggtaaacttgttcctttttatttattttttactaaatatgacttggcatattatgcttttttgtcgagccgagggtctattggcatattatgcataattcaagataattctcatataacgtgattggctattggtgcttgttgagttatattatgtctcatatctagtatgttaggacatgaaacgggatttataaaggttttaggttcatatattgccttaatattttggacaggatgctctggcctaccttcgctgaacctgaaaatcatttttgagattgggcaatcgtctattatctcctcgagtcacaaagatacttataatcaatttgatatgaagaataagttttaagttaagtcattattattattgttgggtaattaaaggctttgttaatcaccaagtaaatatttacaattctcagcttgattacatcccaaccacctgttctcaaataatgatctcaaacacaaacaaaattgctatctaggctgcgaaatattcacgaatgtctctcctagattacatgttactctctttctcctagcatctctctagtgaattttttttttctagaagtagcgctgctgcaataagctctttactcctgataccctcacgctgcgtacgcaagcaatttcttttgctatggtttacacaactctttctattctttaaaaaattctggtatttctttcattccatatggcatgaacatgttctgcaaatatcattcttagcaaccgagcatgtagagtcttccctttggtgttaatcatcagatgtttccacggtaccttggcatgatctcccaacaactgtagatagatatgtctaatcaagctttggtttccttttggagcgccttgtatctgtctcagttgttctccaatattttccccaacatccaactagcttgttgtggtatagcgatagagtccagttattgccctttaatgtaaaaggcatgtatcaatttgatccaccttgtgctctgggtcccaacacactttaacgatagcagctttatgccagattttaatattggtgagttgaaaacctccagcagcacatggtaagcacatcttctcccaagacacaagagctttctttgttatagtattagcccccgaccatatgaaacttctacagtaggttgtgaatctgtcatgtagtagtcattattgttaaaggagtcatgagaaagggtatatatggctaagtatgactaaacctttttttgtgtataataggagattttttaaaatgaaaacccgaaccacacatatagaactaaaagtaataaaatttaggggtaagttattggatggtagggtggtggtactttaacgactggtgggttctaaactagagtatgtgataacagcttatcttcttttgttttagatttttacgctacagcagctctaggcgagctgaaatagagagaaaggaaagttattatttccgtgatattttccttatgccagaagagatattaggattttgaaaagaacagactccttctgttctctctttgaattaaactaaaaacaaaacaatttttacttttctcctctgtccggtcattccaacaatttatgctagcgatgtgaatactagtccaggcttgggtacaacttgttggttctgatgtgtaacactcttccgcaacttgttgcttaaatatcaaacgaaaagcctagtaatgtctgttgaaaatgaagacttttatctctttagtttgatggtaactgtgagtcatttaatgttacgtttccctccatgagcagagctaatgcagaagtgtgtatttttccttctgaaagtcttattaaggcaaaagggaagcccggtgcacgaggcatctcgtgttcacgcggggtccggggaagggccgcaccccaaggggtatgacgtagacaacctaccttaatgcaagcattagtggctgtttccatggctcgaatccgtgacctataggtcatagagacaactttaccgtttcttcttaaagttttattgttagctttaaacaattcccaactactgtaacaactccagatttttatttatttgtcttatggggagatttaagtttgcttcatacttgagttgattattttcaggaatcaactagcacatacgagcatatagaagtaagcactggtggaaagttgagtaggcacaatattcatatccagcaagttggtccagacacagttactgagttatctacatttcatatgtgtatctctgatcaaacgcaagatctacacagtagattagtcctagatcaccctcgaggtgtctctcagcagatccacaagtgcattgtggcccattcgtctggacaggctgtttttgatggaaacgttcaagtcaataggtattatattctgtctcacctttggtgtttatttgagtgactcgttctacaaatcaccagtgttgaacatttacatactgatattgttttgtttctgtattctatatctcatggtactgtttccgttcacgttctcttacgtggttttctttttaaattatttatgaatcctaagaaagatatcctaaagatatcctaagaatgtatatgatgatatcttttcttggagggtcccaactttacattgttcaaaatactttcactactatttcactatggtataatcttagtcaactcttggattatgttctgcaatctagaaagatattccaacatattaagatagtataaggctgaatggaagtggcatattccacgacatcagttaaagttagcagcctcgacatttcttgctttttggtggtcaatggatcaggtgtcatttgctagttgtgtccctcaaatcctctgttctatccatgtcaaacggacatgggtactttgtatggattttcttaaaacagttgatgagaaggggagagtcttggcgtaaccggtaaagtagctgccatgtgaccagaggtcatgggttcaagccgtggaaacaacctcttgtagaaatgcaggttaagactgcgtacaataaacccttgtggtccggcccttctccggaccccgcgcatagcgggagcttagtgcaccggcttccctttttttccccttaaaatagttgatgaatctatgttaagtacctgtgtggttgtgtccaatagtcaaaaccagagtatttcagttgattataacgacttttccaatctattagaagagctggtgtctcagcttttgagttttatcttatcaataagagatgcaatgcaaacttaggaaagacttcaccttctctcctcctttaatttacacaaactgcattggattacacaagtctttattcaagataccgcacacgactgtcaatttgtgtcaatggttttgattattgtttaatgcgtgagatttaaatgtgtctgttattataaatgatgttgcagatacgcgcagcagacagatgcaggacaacttacacggagcctccttttggagcctcgagcaactgtgaatgtcaaacctaatctccaaatcatcgctgatgatgtcaaatgctctcatggtgctgcaatcagtgacctcgaggaggaccaactgttttacttcagagcacggggtgttgacgttgaaactgccagaaaagctttgatcttttcgtttgctgctgaagtagtagaccgtttcccaaatgcttcaattcggaagaaagttgaaactcatattagagaattgctagatccctcacgcccttaatggtgagacgttgttgaaatgtggcgcatttttctttcttagttccgttgtgcactaatgataacaaatgaaagtccgttttctaataaacgaaaataagcagcttttcagtgtaatcctctttatattaaatgtaattctttttggtattatagaaataatatggttatgtttatttgaatccattggctatgctacttgaaacattttctgtctcactagtcatccattcttggc

SEQ ID NO: 200 - DNA, 1518 bp, Nicotiana tabacum
atggcttctgctttggcaccaatcttctctactaaatcaacttctgtatctgtatcctcatctctctcaacaccaacaagaatttctactaaatcaacctctgtatctgtatactcatctctctcaacaccaacaagaattaaccagaaaaatcctaaagttagagtctttactaaacctaaattaaatccaatttcagcattttcagacccatatgttctccaaatagctgaaacccttgaagactctttaccttccttatcttccccaccacttcagaaattaagggaaacttcctcagaaaccctactttcaaccccttggccttctcgtaaagatgaaccttttagattcactgacacttcattcttgaaaaattcaagaattgaaccaattttgcctccaaagattcagagttcttctttggatgtattttcagatacccttttgcctacaatttcgattcttgatggttatattatgaatgaattgtctcagttaaaagaattggctagtggtgtttatgttggtagtcttttgagtgtgaaatctgaggccatattgaaaagggtgtctgagtatgaatctgattttaagggtgatttgttttggtcacttaatggtgttggtacccctgatgtattactagtgtatgtgccagaagggtgtaaagttgagaatacattggttttgaggtacatttcaggtgagagtagcgataagggatcaaaagctttgcccttttcgaatccgagggtgttggtgttggtggaaaagggaggggagattagtatagttgaggagtatgtaggtggagaaaaagataaatgttactggtcaaattctgttatagaagtggttgttggtgaaggggcaaaagtgagccattcttacctccaaaatcaatctttaaatgctgcacatatcaagtggacttgggttcagcaggaatcaactagcacatacgagcatatagaagtaagcactggtggaaagttgagtaggcacaatattcatatccagcaagttggtccagacacagttactgagttatctacatttcatatgtgtatctctgatcaaacgcaagatctacacagtagattagtcctagatcaccctcgaggtgtctctcagcagatccacaagtgcattgtggcccattcgtctggacaggctgtttttgatggaaacgttcaagtcaatagatacgcgcagcagacagatgcaggacaacttacacggagcctccttttggagcctcgagcaactgtgaatgtcaaacctaatctccaaatcatcgctgatgatgtcaaatgctctcatggtgctgcaatcagtgacctcgaggaggaccaactgttttacttcagagcacggggtgttgacgttgaaactgccagaaaagctttgatcttttcgtttgctgctgaagtagtagaccgtttcccaaatgcttcaattcggaagaaagttgaaactcatattagagaattgctagatccctcacgcccttaa

SEQ ID NO: 201 - protein, 505 aa, Nicotiana tabacum
MASALAPIFSTKSTSVSVSSSLSTPTRISTKSTSVSVYSSLSTPTRINQKNPKVRVFTKPKLNPISAFSDPYVLQIAETLEDSLPSLSSPPLQKLRETSSETLLSTPWPSRKDEPFRFTDTSFLKNSRIEPILPPKIQSSSLDVFSDTLLPTISILDGYIMNELSQLKELASGVYVGSLLSVKSEAILKRVSEYESDFKGDLFWSLNGVGTPDVLLVYVPEGCKVENTLVLRYISGESSDKGSKALPFSNPRVLVLVEKGGEISIVEEYVGGEKDKCYWSNSVIEVVVGEGAKVSHSYLQNQSLNAAHIKWTWVQQESTSTYEHIEVSTGGKLSRHNIHIQQVGPDTVTELSTFHMCISDQTQDLHSRLVLDHPRGVSQQIHKCIVAHSSGQAVFDGNVQVNRYAQQTDAGQLTRSLLLEPRATVNVKPNLQIIADDVKCSHGAAISDLEEDQLFYFRARGVDVETARKALIFSFAAEVVDRFPNASIRKKVETHIRELLDPSRP

SEQ ID NO: 202 - DNA, 1694 bp, Nicotiana tabacum
tctcttcccctctttctctttctcaccatttcatcactccacaaaacactgacacataacaaaatatatgcaatatctatcgatcatatcgaaatctcaaaaatttcctaattcaaaaccctagttttttttgctattttcatcaaatcacatccaaattctcgaaattttctgtaatgtgattaacgttgattgaagcattgtaagtttgagtttttgtgtgtatcaatggcggagcggagattcggagtaggttacgctttagcaccgaagaaacaagcgagtttcatacaagcaacgctcgtgaacctcgcgagcgaacgaggaatcgatctaatacgaatcgatatggataagccgttaatcgaacaaggaccgttcgattgcgtgcttcacaagttatatggtgaggattggagactgcaattgaaagagttttctttacaaaatcctcaggcgctcattatcgactcgcccgagtcaatcgagcagttacataacagaatctcaatgctgcaggtagcgaccgagctggaaattaagtgcgaaacggcttcttttgggattcctaaacagactgtagtttatgacgcgaaaatcgtgtcggcgagttatttggaaagtgagggattgaaatttcctgttattgcgaaacccttagtggctgatggtagtgcgaaatcacataagatgttattggtgtttaataaagacgggttaactaaattgaaaccgccgatagtgttacaggagtttgtgaatcacggagctgttatttttaaggtgtatgtggttggggactacgtgaaatgtgtgaagaggaagtccttgcccgacgtgactgaggagaatttagggaaattggagagttacttgtcattttcgcaggtttcgaatttgaatacttgcgagaaaaatgatgataagtactataagttgatgaatttggatgatgctgaattgcccccattgagttttttgacggatatagctagagggcttagacgagcgacgaaattgcatctttttaactttgatttgattagggataatagagttggtaataggtaccttattattgacattaactatttccctggttatgccaagatgccgaattacgagagtgtgatgacagactttttttgggatgtattgaatcagaacgacaagggtttcgagagtttacaaaaagttagttgtgagaaggaggttaggatgttggttgggaataaagggtatggcgaggatgaagggacattacctgtttcgcctcttaagagagaagaaaaagagaacactattcaggtctaaggacgtgaagtgcacaaatcaaagtttcatggcaaagggtggcgaagggtcgatcggaagatttgctcaagatatggactgtgtcgcgggttactgtcaaaactgccgaagtttcttttaggtagggagttattagtacagcagtgaataagtaggttcctgatatggccttttttttaaggcattagatggtgttctttgttgaaacatgtacattctatctttgcagtggagataggtacttgcagatactcttttctaggaaagtttagttttcttaaaggcaattgtatttcattggcgactatttcaatatgtgcctttaactttgatatcaatgaattttgctgtattctcaatggttatcattctatatttcc

SEQ ID NO: 203 - DNA, 1086 bp, Nicotiana tabacum
atggcggagcggagattcggagtaggttacgctttagcaccgaagaaacaagcgagtttcatacaagcaacgctcgtgaacctcgcgagcgaacgaggaatcgatctaatacgaatcgatatggataagccgttaatcgaacaaggaccgttcgattgcgtgcttcacaagttatatggtgaggattggagactgcaattgaaagagttttctttacaaaatcctcaggcgctcattatcgactcgcccgagtcaatcgagcagttacataacagaatctcaatgctgcaggtagcgaccgagctggaaattaagtgcgaaacggcttcttttgggattcctaaacagactgtagtttatgacgcgaaaatcgtgtcggcgagttatttggaaagtgagggattgaaatttcctgttattgcgaaacccttagtggctgatggtagtgcgaaatcacataagatgttattggtgtttaataaagacgggttaactaaattgaaaccgccgatagtgttacaggagtttgtgaatcacggagctgttatttttaaggtgtatgtggttggggactacgtgaaatgtgtgaagaggaagtccttgcccgacgtgactgaggagaatttagggaaattggagagttacttgtcattttcgcaggtttcgaatttgaatacttgcgagaaaaatgatgataagtactataagttgatgaatttggatgatgctgaattgcccccattgagttttttgacggatatagctagagggcttagacgagcgacgaaattgcatctttttaactttgatttgattagggataatagagttggtaataggtaccttattattgacattaactatttccctggttatgccaagatgccgaattacgagagtgtgatgacagactttttttgggatgtattgaatcagaacgacaagggtttcgagagtttacaaaaagttagttgtgagaaggaggttaggatgttggttgggaataaagggtatggcgaggatgaagggacattacctgtttcgcctcttaagagagaagaaaaagagaacactattcaggtctaa

SEQ ID NO: 204 - protein, 361 aa, Nicotiana tabacum
MAERRFGVGYALAPKKQASFIQATLVNLASERGIDLIRIDMDKPLIEQGPFDCVLHKLYGEDWRLQLKEFSLQNPQALIIDSPESIEQLHNRISMLQVATELEIKCETASFGIPKQTVVYDAKIVSASYLESEGLKFPVIAKPLVADGSAKSHKMLLVFNKDGLTKLKPPIVLQEFVNHGAVIFKVYVVGDYVKCVKRKSLPDVTEENLGKLESYLSFSQVSNLNTCEKNDDKYYKLMNLDDAELPPLSFLTDIARGLRRATKLHLFNFDLIRDNRVGNRYLIIDINYFPGYAKMPNYESVMTDFFWDVLNQNDKGFESLQKVSCEKEVRMLVGNKGYGEDEGTLPVSPLKREEKENTIQV

SEQ ID NO: 205 - DNA, 7570 bp, Nicotiana tabacum
cacgtgtcgtcttctctatttcattctttttgttttccaataacttcaatatcccgcaaaaaacattacaaaatagattactccattttctctgtctagaaatattgtttcttctctctctaaaactcattttctttcacaacaaactcaaacaaaattttcttttgcctctctgtgtaactctgcttttatagagaagagatatatacatataacagtggttactgttggggagggggggtatgaaatgaatagaacgtgaaatgggaggcggtttttcgtgttttaccaacccggcggtggtgaaccggactgaaccggaggtaatattcacgggcagcgaaccgctcgacgaaaccctaggtcattccttctgctacgttaggtcatccgcccggttcgctctctctccgacaaactcggaccggttcatttcgccttctcagtcactccggttcgataatgaagcggctccgttaaggaccgaaaccggattcagagcgatttcaggtgcttctgttagtgcaaatacttgtactccccgatcggtcctccaacttgataatatttacgacgatggtactggtagtgttgtgaatggttttgaaagtacgtcgtcctttagtgctttacctcttcaaccggttcctcgaaccggtttaagcaacgaaccggctggtacaatggaaagagagagggctttcttcatgtccggtccgatcgagcgaggagctctatccggtccactagattccgccgttccattctcagctccgttgggtggtgatggcatttatgtaaaaaagagaaagttgaagggcattaatggaattaaaaaagcctttagacggccgtgggtggtgccagtgagaaactacttcacaggtaaaaaggaaattaactgtacacgtgattataatggatggcatttgcgtaataatgtgaatgttgaatgggcattaggaaaagcaggggaggatcgtgtacatgtggttgtatgtgaagaacatggatggctgtttgttgggatttatgatgggtttaatggacctgatgcacctgaattcttgatgagtaatctgtacaaagcaatgaacaaagaattagagggtttgttttgggatagtgaagatactagtattagtaataataaccaagaaagcaaaaaaaatgcaaatatagaaaatgaagtgatcattgaggactcaaatgaagctaattcaaatcaagtgcataaggagatgagtaggggggataggggagtagaagaagctgaaaatgaggttaatttggctcagatggataaaaggtgtgaaaagaaggtgatatttcaatcagataatgcaaatataaaaaatgaagtgattggtgaggactcgaataagccacattttaatcgaggacctaaggccacaagtaggggggctatgggagtagaaggaggtgaaaatgaggttaacttggagcagctagataaagcccgtaaagggtcggaaaatgaagtgattggtgaggactcgaacaagccaggttcgaatcgagcacttgatgccacaagtaggggaaataggggagtagaagaaggtgaaagtgaggttaatttgggacagatggatagagggtctgaaaagagagtgacatttcaatcaggggagatagaggttaggaggaggagattgtgggaatttttagcagaagatgagacagaggatggtcttgatctttctggttcggagagatttgcattttcggtagatgatgcattaagtgtaaatagtgcaggttcagcggttaataggaggtcgttgctgttgtcgaagttgaaacatggtttgtcaattaataagaacaaagagagtaacaggttattcccatggagattcggattgcaagctaaaaagaaggttgaagtaggggagaagagagtggaggaaaggattgatagaagtgaaaggaagcgtaaggggggtccggttgatcatgagttggttttgagagcaatgtcaagagctctcgaagtcactgagctcgcatacttggatatgacagataaagttcttgatcggtaccctgagcttgcattaatgggttcttgtttgttggttgctttgatgagagatgaagatgtgtatgtaatgaatgtgggagatagtcgtgctattgtggctcagtacgagtctgaggaggttagttctagttcagaaccaatagttccaggcaattgcgagttggctgttgagagcattgctgaagaatctgtagttgccggtgatgaggaaaataaggcgacgaatgagatacctattcacgctacgaagctaactgccttgcaattgtcaactgatcacagcactagcattgaagaagtaaggttcctcggtttctttgttagtcaataggttgtttctgttgcttccttccatgttttaagtttaactgatttatgagttatgatattttaagtaatggagtacataattattttactctgtaagaatcacaaaacttcagaatgatgaattcatgtaaattaaaagctgtttcctttatatggtgctccaaaatattatgccccttgtgctcatcactggatttactgatctaagatcattgaatgtagtaggttatgaaattaaatgggatataatttctaaataaaagtctctgaagcaaagaggtctcaaagtcagtttcttgctttagttacatgcagagcagtatcatatatgcgcctgtcaaactggtttttctgtaggtctggtgttttgaatcttttggtcacagtgtattgaaccattatattgttgggttggcagcatttagctggtataggcaggttcttagaaacagttcagcatttagctatagtttgaccctctcaaatggttccttttcccataatcacttattcctttccatgtcataagcttggtcttcttcattatagtaggttcactctttactgctgtgctcactttagatgagatgctgctcctttagctcaaatctctttctttgcctctctctctctctttctctctctctctcaaagattttaacaaatgtgagtgttccaaattttcatgaacttgtgcttaatctcgatgagtggatcaggaaagcattcagatcctttccgatattgattgccttctaatcttaaaactttcttaaaatagagtgcaatactgttccaaacttgtggttcataagtcgtagggatattttagaaggtataattttgccactctttagtgtaattgtgacaatgtcaccaaacatcaagttgatacaatgtgcagcacaaggagtccaataaatatttgggaaaactcctttcaacatgtcacccacttttttattctcacttgcgttatcagtaacaacttgaaccacattttccggtccaactttcaatattgtcttctcaaacaagtttgaacattttattggaattggttgaggagtcactagcatcataagattcaagaaacacactacttctcggagaattcaccaaaacattaatgatcatttttccattttttgcagtccatttgtccatcataatggaacaaccataaattttccattgcgccttatgctcctcgacaatcttgtctgtcttctccatctcctttttagacaaggaactcttacttcgtgataggtaggggacttcattcctgggccatattggcctacgacctcaatgaattcaccaaaactatcggtgtaattcacacaattaaaagggagccccgcatcatacatccaccttgcaaaagcatctacaacacgcttccttaaactcttcctacaagaatctaagtcaatagcttcgccctttctcttttcatttggtttttgtgagaaaaaaagattaagaggacctttcacattgctaccggcagtggatgatccacttccacttgttgaattctttctttgagatttagagggaggtggcctcattatatcattgacttcaacgccatcctcatccatttgactatcttcatcaagaagattaatcatagatgctccatggctcattggattttttaactcatttttttctcaacatactctcatttctttcttaatagtagccggaacacttggacatctctaaaaccaccgattagatgtctcttgtgacgatgtattccaccgttataaattttttgacaaaagatacattgcactcttgagttattattgccaactgcaactccatacacccaagctggatctcttttttggcttgatgctattgagtaatcaaattaaatttactacaatcaacaaccaaaaaaaaaaaataacaattaatttactgataaattgcagaaaaccaagcataaagcagcataaaacaaagcacttttaataacagaagaagaagaagaagtcgtttagggcaaaaaatgagcgcttaaaaagtgaaaaaaattgaaagaagaagaagaagaaacttaccgagatctggagaagaagttgttggagcagcagtggtcgtcgctggagttcgctggagtagaattccttgaagagcgtatgttttggtaacagatggtaccggctcgcttctcgcttaagcgagaaaagcgcacactttttgaatgtgagtcgcctttttaacagaaaagcgctaaccctgcgcctcgcgtcgcttcatcgcttaaagcgagaagcgagcacttataataacactgctcctgtgtttgttgggcctttttttatcaagacattaggtgagcacaaataatatatattggctccaatttgaggcctgcacattcaagttgatcttttcgtcttttatctcaattgcccccatacaaattgcaattcactgatttggctagttgttgaatgagctagtagctgtaacagcacctgtattgctgacacatataattctaatcactctttactctgacataaccatttctgatgtccagatacggttaatgattctcgtgttgtctgtttcggttctaccaagttacagcttctcattgttgttagtaaagtgtgtttgaccaatgaatgcgattggcactttctgtctcatttgtcattgtgaattctgtaatttttaattgtttgttgctcgtcacattttcacgtttgtatcttaatcagtcaggttcttaaacagtttgtttcttgtaacaatttccaggaagttattagaatcaagaatgaacacccagatgactgcaattgcattgttaatgatagagtgaaaggtcgtttaaaggtcactcgcgcttttggggcgggcttcctgaaaaaggtttgtcatttgcttttctttctccattctggtttccaatcccaaaaatctcaagcaattgcatcaaattgcacatctgcacattcggagcctcgttttgctttagatattgtggtatcagaggaccctctttgactatttctatttctggtttggctgaaattctgtggatctctaggagatggaatgccttgcactcttagtcctagcattccatctagtacagaaatatatgtttctgcctgtagttactctggacaagtaaagttcgccacacgtttaattatttaaatgaacatcctacgttgaattgttgctgtagacttatatcctgttttgacatgcttgttgccaatccgcttaatagtttgagatgtgcctgtgcagcctaaattgaatgatgcattgctagaaatgtttcggaacgagtacattggggatgctccttatttatcttgtaaaccttcactgcgccatcatagactctgtcctaaggatcagtttttggtgctatcctctgatggcttgtaccaatatttgagcaatcaagaggtggtttgtcatgtggagaatttcatggagaaattccctgatggggatcctgctcagcatcttattgaggagctcttattccgtgcagccaagaaagctggtatgtattctgtctagtctttctgtgcagagttaagggtaaaaagttacagttttggtgattttttacgttttcaagtggtcgcacgcccttaatttttgctaggaaattacatttaaattttcagattttctcaatcatcttccttttattctccaattgagaccaattctgtattaggtgggaacattaaattggacccgctccgattctgtgacacattaacggacaattgcttattctggatttatgaccagataatctgccatggcttagtttgtttaagtctattctctttaactgatggaacaaagatacgtcttgaggtttgagaaacatctttgtcctttactcatttaagctgttgcactagctctgatatttgataactataaaaagcctatttgcccctgaattatattccaattgaattgtactagtcctcagtcctcaccttatgacttgtgtctgtggaaagtggaagtctattcttttggggaagaaacgctagtaaaagactaactacccttatgcaggtgtccatgtaaagccttggtaaatgtctccttatctagtagtttgagtttttgcacctatgtactgctctgacacctagttcgtgggaacacttggtggatcgagtgtataaatgaaatgtagaaattgatagatcagataacagaaagtccttttagacaactccagatgaagtcattagtttcatatcactttctgaatggaaggactactaaatactttggctccatctccacagtaatcattagtttctcatttagtagcatgttttttctctaccatttcgttttatgtattttcgcggtttaggtaaactatgatttctaaatctgatttcatggttatcttatgatggcctctgtagataacttgttttgtgttgtggcatgcaaatattacatgttttccaattgagttgttaatgttttcttgcaggaatggattttcacgaattgctggacatcccgcagggagatcgtaggaagtaccacgatgatgttactgttatggtggtatctcttgagggaagaatttggaagtcgtctgggaagtacgtctgagtttttacaatttccatgtatagtggtgcgctgcaattttgatctcttgagctgggatgttgggaacaatggtgggagctggatagtcgatcaagctcgctgctctgtttatacccttgacaacagccaaaactggtgctagaaagacgacaaggctcgtgaaagtagaaatttagtagctgggattgctcagaactgctcctagaaaagaaagaaacaggatctcttcatttagtttctttttagatttgcacagtagaatagatctttccattctttcaagttctttctttctttttgcccccatctcatctactctttagagccaaaatcaagtaattgtgaccaggtgggtggcttagttactgagttttagccgatatatctgtatttttgaggtggatatccaccaatgcggtttacagaggagagaattcttgttgaaccctttgtgtaaaaagttctatcatagaatggggcaaagggaaaggtacaacacactcttatgctgattgc

SEQ ID NO: 206 - DNA, 2607 bp, Nicotiana tabacum
atgggaggcggtttttcgtgttttaccaacccggcggtggtgaaccggactgaaccggaggtaatattcacgggcagcgaaccgctcgacgaaaccctaggtcattccttctgctacgttaggtcatccgcccggttcgctctctctccgacaaactcggaccggttcatttcgccttctcagtcactccggttcgataatgaagcggctccgttaaggaccgaaaccggattcagagcgatttcaggtgcttctgttagtgcaaatacttgtactccccgatcggtcctccaacttgataatatttacgacgatggtactggtagtgttgtgaatggttttgaaagtacgtcgtcctttagtgctttacctcttcaaccggttcctcgaaccggtttaagcaacgaaccggctggtacaatggaaagagagagggctttcttcatgtccggtccgatcgagcgaggagctctatccggtccactagattccgccgttccattctcagctccgttgggtggtgatggcatttatgtaaaaaagagaaagttgaagggcattaatggaattaaaaaagcctttagacggccgtgggtggtgccagtgagaaactacttcacaggtaaaaaggaaattaactgtacacgtgattataatggatggcatttgcgtaataatgtgaatgttgaatgggcattaggaaaagcaggggaggatcgtgtacatgtggttgtatgtgaagaacatggatggctgtttgttgggatttatgatgggtttaatggacctgatgcacctgaattcttgatgagtaatctgtacaaagcaatgaacaaagaattagagggtttgttttgggatagtgaagatactagtattagtaataataaccaagaaagcaaaaaaaatgcaaatatagaaaatgaagtgatcattgaggactcaaatgaagctaattcaaatcaagtgcataaggagatgagtaggggggataggggagtagaagaagctgaaaatgaggttaatttggctcagatggataaaaggtgtgaaaagaaggtgatatttcaatcagataatgcaaatataaaaaatgaagtgattggtgaggactcgaataagccacattttaatcgaggacctaaggccacaagtaggggggctatgggagtagaaggaggtgaaaatgaggttaacttggagcagctagataaagcccgtaaagggtcggaaaatgaagtgattggtgaggactcgaacaagccaggttcgaatcgagcacttgatgccacaagtaggggaaataggggagtagaagaaggtgaaagtgaggttaatttgggacagatggatagagggtctgaaaagagagtgacatttcaatcaggggagatagaggttaggaggaggagattgtgggaatttttagcagaagatgagacagaggatggtcttgatctttctggttcggagagatttgcattttcggtagatgatgcattaagtgtaaatagtgcaggttcagcggttaataggaggtcgttgctgttgtcgaagttgaaacatggtttgtcaattaataagaacaaagagagtaacaggttattcccatggagattcggattgcaagctaaaaagaaggttgaagtaggggagaagagagtggaggaaaggattgatagaagtgaaaggaagcgtaaggggggtccggttgatcatgagttggttttgagagcaatgtcaagagctctcgaagtcactgagctcgcatacttggatatgacagataaagttcttgatcggtaccctgagcttgcattaatgggttcttgtttgttggttgctttgatgagagatgaagatgtgtatgtaatgaatgtgggagatagtcgtgctattgtggctcagtacgagtctgaggaggttagttctagttcagaaccaatagttccaggcaattgcgagttggctgttgagagcattgctgaagaatctgtagttgccggtgatgaggaaaataaggcgacgaatgagatacctattcacgctacgaagctaactgccttgcaattgtcaactgatcacagcactagcattgaagaagaagttattagaatcaagaatgaacacccagatgactgcaattgcattgttaatgatagagtgaaaggtcgtttaaaggtcactcgcgcttttggggcgggcttcctgaaaaagcctaaattgaatgatgcattgctagaaatgtttcggaacgagtacattggggatgctccttatttatcttgtaaaccttcactgcgccatcatagactctgtcctaaggatcagtttttggtgctatcctctgatggcttgtaccaatatttgagcaatcaagaggtggtttgtcatgtggagaatttcatggagaaattccctgatggggatcctgctcagcatcttattgaggagctcttattccgtgcagccaagaaagctggaatggattttcacgaattgctggacatcccgcagggagatcgtaggaagtaccacgatgatgttactgttatggtggtatctcttgagggaagaatttggaagtcgtctgggaagtacgtctga

SEQ ID NO: 207 - protein, 868 aa, Nicotiana tabacum
MGGGFSCFTNPAVVNRTEPEVIFTGSEPLDETLGHSFCYVRSSARFALSPTNSDRFISPSQSLRFDNEAAPLRTETGFRAISGASVSANTCTPRSVLQLDNIYDDGTGSVVNGFESTSSFSALPLQPVPRTGLSNEPAGTMERERAFFMSGPIERGALSGPLDSAVPFSAPLGGDGIYVKKRKLKGINGIKKAFRRPWVVPVRNYFTGKKEINCTRDYNGWHLRNNVNVEWALGKAGEDRVHVVVCEEHGWLFVGIYDGFNGPDAPEFLMSNLYKAMNKELEGLFWDSEDTSISNNNQESKKNANIENEVIIEDSNEANSNQVHKEMSRGDRGVEEAENEVNLAQMDKRCEKKVIFQSDNANIKNEVIGEDSNKPHFNRGPKATSRGAMGVEGGENEVNLEQLDKARKGSENEVIGEDSNKPGSNRALDATSRGNRGVEEGESEVNLGQMDRGSEKRVTFQSGEIEVRRRRLWEFLAEDETEDGLDLSGSERFAFSVDDALSVNSAGSAVNRRSLLLSKLKHGLSINKNKESNRLFPWRFGLQAKKKVEVGEKRVEERIDRSERKRKGGPVDHELVLRAMSRALEVTELAYLDMTDKVLDRYPELALMGSCLLVALMRDEDVYVMNVGDSRAIVAQYESEEVSSSSEPIVPGNCELAVESIAEESVVAGDEENKATNEIPIHATKLTALQLSTDHSTSIEEEVIRIKNEHPDDCNCIVNDRVKGRLKVTRAFGAGFLKKPKLNDALLEMFRNEYIGDAPYLSCKPSLRHHRLCPKDQFLVLSSDGLYQYLSNQEVVCHVENFMEKFPDGDPAQHLIEELLFRAAKKAGMDFHELLDIPQGDRRKYHDDVTVMVVSLEGRIWKSSGKYV

SEQ ID NO: 208 - DNA, 7546 bp, Nicotiana tabacum
tttaccatcacctaattcaaacctgttatatgttcgcccctatatttacttgtttatattataaaaatcctaattccgtgctattttagaccaaattgatttgcttaaaatgacacattgaacctcgtcgggcaaaaggtttgaggagcagacacccaaaaaacagccgttttcctcaactgtcaggctcagaatactataaaataccaaccgccttgtgtttcactccgcccctctgccaccaattcaactatttttttgctggtaaaattaaagcttatttttcctccatgtcaagttcaaagggaagtcgcaaaggatcaaaaccaactcattattctcgtcgccaattcaataatcaaaattgggtaatcaaatctcctctcaatcaaaatccaattgatccaatagaagtttcaaaacaagaacccatttcagagtttattccaaaagacccaaaaaaccctcagaatcacaaaaattccaaaagggtatccaagattcggcgtgctcatgtggttaatggaaactttgagaagaaagaggatgaagtagatattgtaaaacaagaaagtgttaaagaggaagaaaagagtggtgaaagtgtagagaaagtgaaagttgaggggcctgttttggaaaatagtggtgatagtgtagagaaatttgaggggtctgttttgtataataatgatgttgattgtatttggagaaggctagaggagctgcaattgagtgctgaggagcccgagttatcggctgaacagcttagaatcaatgatcaagctcaggaagatgaggtaaaaccttatattcctttattaaaaatttaaactttgatgtctttcgactataaattttatattttataattattattactaaatatgtacggtatgtcaaattggcctgttaaactcgcacttaagggtgtagcctagtggtcaataaagtgggaggagaaccatacgtctcaggttcaaatcttgtcctcctgcctaagcctggtatttctactggtgggaggtagcgggtacccgatagagtagtcaaggtgcatgctggtacggataccactatcataaaaaaatttgttgaactccacgtgcagtcaaataccgtcacaaaggaagtaccgtctttcgttgccaggcctctcacattgtggtgtaggtttaaggtttacaatgcagtgagagtagtctctaatgtagaaatgctataatcgaaccatgtcactgttcgactcaaaatgagtgggaggttgggcttcgtgcattagcatttcgttggtttcttatggttgtctagtatatgaacaaatagttgtcgtcgaaaacaagccatagttatttgtattgctataaatcatcccattaagggtaaaattgaaagtttaaagttaaaatttttccaaatataaaaagatatcattttgttttggtatagacaaaaaatgaaagagtatcacttaaattgggacagaggcagtacaagttagattagcatgttaaactccatgtctaatcaaatatcttccttcacagctagcctctcacagtgtggtataggtttccggatttcaatgcagtgaagtagtatctgatgtggaaatgttataatgaaccttgtcattattcaatttgaaatgagtggaagatggttaaaaaattgcatcttgcattagcatgtccttggtttcttatggttgggctagtatatgacaaatagttgaataatcttgtgtgagaggaaaattgtttctttttctttttcatttgtaatttaaacgtttgtggagatatggctaatgtgaaccagtgttgtcaaaggcgcgcttaaagcgcggttaagccctaaagcgaggcttaaaacatgttgagctcttcgccttgctagcggactcttcagtgttgtcatcaacgctctaaggcatacttttccttgccaatgagcgtaatcctaaagaggcaaacctaaacaagtgatattttactttattgtaagaaaaatcatttttttatccatatatttgttattcatgcttataactatcagtcttggattacacatgcatatttatattttttctccatttgcacctttttttttttaagtccacgttttatttgcgcttaaagccccgatgtaccttggagcttttttgcgcttttcgcctttgaaaacactgatgtgaacttaacttgtgcgagtgttctcttggtgttagagtgtgcagtattgtggtgtactgagataattaattgtcaagaaaatataaatcctcttctctgtatctccctctccatctttattttcatttgtttatttaaagcacattttgacattatagatggttctttgcagttactagtgctggaatcaatttatggtgacaatgtcttcattcttgatagacaaaatggcctacgatcttttcaggtattgtagtgccttgataaactcataaactatgctttactctgaaaaaccaaagctcattttgtgctaatttgcagattcatatacatattgaagttcctgatgagctgacggtgtttgtaaatttaagttcctctggtgctctaggaataccagaagatagttcatctgagtgctcatactccttcaaagttgagcatttaccaccaattgtgttaacgtgtttattacctaaatcatatccgagccatcttgctcctcactttacaatctctgtccagtggttggatttggcaaaaatttcctctctttgctctatgcttgattcaatctggaaggatcaattaggtcaagaggttatataccagtgggtggagtggttgcatagctcttctctttctcattttcagtttgatcaagaaataaagttacgtttttgtgccaagagtcatattggagattgccgagcaatttcaggaactgtctcaccagaggttgatatcccctcactcaagaactatgacgaggaacaacgccatgagaatttccgtagaaacattcatcagtgttgcatatgtttcagcgaatttcctggtattttcgaaatcttatactttattttgtttataatagtatattgtaaaaagccgtaatatccctggaatttaaaaaataaacttgagtccaaaagttaatcgacaaggtttcagtccaatcattgagggcaagttgtgtgatccgatcaagttaaggaggaagtttacttacgattccactttttgatcagtcctttttcattagcttagtaacaaggagaatcttcttcatgaatggtatggaacatttgctgcctgttttgccaccttcggaagtgtaaccagttcagactcttccgcgtttctctgatgtttctatttctacaaggaagataaggttgtgtattcagatgcttatctttaatattcattaccgttgtatctccttggttgttgtgtgaggaaaacaaataaaacgacattctattattatctctgctcattctgtggtttaacttgattcttacagttattcttcccatcataggatccatcctgttctgtgtacgaatgcgtgcattttcagttttagaaaatatgtgaacacacagagagagatatacccgcctcttcccctctcttgtatgtacacattaggcgtgaacatataggaaattggatatccaataacctctcaagtgataagtgggttctgaaacttttgtttttatcaggtatggagtttgtgaggttgccatgtcaacactttttctgctggagttgcatgaaaacttactccgatatgcatgtcaaggaaggtacaatcagtaagcttctgtgccctgaggcaaaatgtggaggtatgattcctccgggtttgctaaagcggttactcggtgaagtggagtttgaacgttgggaatcaatgatgttacagaaaacgttggaatcaatgtctgatgtgtgctactgcccaagatgcgaaacaatatgtatcgaggatgaagatgagcatgcccaatgtgcaaaatgcttctatagtttttgtacattatgcaaagagaagcgtcatgtcggagttacgtgcatgacaccagaaatgaagcttcttattttgcaggtatttgtcttgtcttaacttcattatgttcttctccttacgaagattggcctctttattaatataaagaagaacttatgttaaggattgtcctagacattttcttttacctcctctagacgttggttaagtttcactatcaaccaatcaatcaactatgcctcaacgcaaattagcaagattccatttcgctctatttagttccatttcattctaacactaaagaatttgtcttttaagtaaacttaggagttttatagaattggaggttctctaagtcacaaacttatctttacagagatatacaacaacaacaactacccagtaaaatcccacatagtggggtttggggagggtaatgtgtatgcagaccttacccctgccccgataggggcagagaggttgtttccgatacagaaagatgaaaataaaataagaaacaagaaaagagaattcattagtaactccagtagtaaccgtaatagtaacataagcataaaaacctatagatgaatgacatgcaataacagtaaccggaatctaaggcccaaggctaagataaacaacaagaatagtatgggttcaacataaactgcaagccatctaagatcaaccctaatccaacctcgcctcacccccggtatgaagtaaggaaagctttactacccctatcctacaaccctaatgcttgacctccaggccttcctatcaagggccatgtcctcggaaatctgcagtcgtaccatgtcctgatcacctctccccaatacttcttaggtctccctctacctcttctcgcacccaccacggccaaccactcatacctcctcaccggtgcatcaaggcttctcctctgcacacgcccgaaccatctgagatatacaaatctctaattcgcataaaaatctccttataccaaacggtccaaacctaatgtaagtgtagtaacaacaactaagccttaatcccaactagttggtatcgcctgtatggattctttgctttcataatgttttctctctttgtggattttagtgtacattgtccctttttatcaccttcaatcattgtattgtcgcgcctacatagcagtgcttatggagttctacaaactaaaccatttcaatcaaccttttctcattttatcctctattacttgcaccgtctgtgtaatcatttataatcttgtttaatcaagggtagcttacattcggtaaaatacttgatataatcatgaatcacaatttccacggaaatacattcatgtaaaattattattagggatttccatgtcctcgatcaagtgataaagaatgaaaaggccgaaaacgaaaaggccttaattgtcaacatggacttatcaattcctttagatgttatgttgtgtccccctctatgaccttccaacggcccataatgctgaaactctggtaagttaggtgccaatttcctcttcttcctccttcaatagatcttggccatagaaaataggcacaacaaagtagtctaaagaggttaaaccctaaggtagcttagttcataaacaattttacaatgtattgaaaatactgtgagggtcttccccaggattctagtactataaggaagagctgatagggatcaccttctacactctactattccatgttaatgatatttgcactttgagaccatcgttcttctatttcataacttatctatcgggaggtttatatttagctcttgtcatttttaatctattgcatcaggagcgacagaattcatctcaactgaaagatcaccaaaggcaccgtgagaaagaaatgatcaatgagattctcagtatgaaggaaattcaccgttccgcgaagcagtgcccttcctgtaagatggctatctcgcgaactgaaggctgcaataagatggtttgcgataattgtggaacatatttctgctatcgctgtaatcagaaaattgaaggatatgagcacttcaggtttggtacaagtttcgactgtagaatggcttcacgtatcgtatgtcctctgtctgtgaccttgatatttcatttatatgcttaatttgaggagctttttcttgttaaagggaggggaaatgtgaactttttcaaccagaagcaattcagatgtgggaagagaggattaatcatcgccaagtggtcggtcagattcaagctcaaatctatgctaatcatggtcatccttgccctaattgtggccaaatgaatgcaaaggtaagacaggttctcaatttcttttccttaaagccgttgtttcgcacctcttcatattttgaagttgaaatgttaatgcagaatgagattatgagcgtctggctaatcgcgcctctcctgttaattgtcttgcctataactatagatgattttagttgagttctttttcgcccaaatttttccgattagtgtgatggtcatacccatagttgtcacttgtcatatattctgtaaccagtgttttgacttacaggagtaactgaaagttgttaactactttttgcttcatatacttttttgttagtgcatttgtcgacaatttttaaattgcagatacaggtattctctctgaaccatgaatcgagctttcagagagattaaattctacgttttgtttattagactgtgtttaacgtcatcatggaaaggatatatggtttagtgttatcagaaaatacattgagagttactttttccacggcgagctaatgaaattagcatatgaatttttattctctttatagagtttatgttagaactcataatgttgttcatattctgttattctttctttactctattgaatctgtctataagtggggaaagggtcctttccatcgtcttcttctttacagtttttcctgccgttgagcagatttattctcttctttccttctttctgtttaacatagtagctaagtcgtcctcgttttcctttgtcatcatcatcgcaggttggcaataacaatcacatattctgttgggcgtgccagaatcattattgttacctttgtagaaagaatgtgaagcgaagctcccagcattatggacctaagggctgcaaacaacatactgctgaatagtccgaaagaaactttcaatttaaggggatttctcccagaaaatttcttccatattcttcgttcgtgcttatggcagaggttgatggctatgatcctagctatcgccggaggactcatcttctcctgtgtgatatatatggcattttcacagcagttgtgaggggatacagtggcgtacgcagaactttgtgcaagttcgtttagacaaactttgaggaatagtaagggcgacggcaacatcaccagcagattttaaccactgctctcttttttttcaaaaagataaaagagttttgcttagtttaaattagctgtgccacaagtcattattcttttttcccttttggtggct

SEQ ID NO: 209 - DNA, 1992 bp, Nicotiana tabacum
atgtcaagttcaaagggaagtcgcaaaggatcaaaaccaactcattattctcgtcgccaattcaataatcaaaattgggtaatcaaatctcctctcaatcaaaatccaattgatccaatagaagtttcaaaacaagaacccatttcagagtttattccaaaagacccaaaaaaccctcagaatcacaaaaattccaaaagggtatccaagattcggcgtgctcatgtggttaatggaaactttgagaagaaagaggatgaagtagatattgtaaaacaagaaagtgttaaagaggaagaaaagagtggtgaaagtgtagagaaagtgaaagttgaggggcctgttttggaaaatagtggtgatagtgtagagaaatttgaggggtctgttttgtataataatgatgttgattgtatttggagaaggctagaggagctgcaattgagtgctgaggagcccgagttatcggctgaacagcttagaatcaatgatcaagctcaggaagatgagttactagtgctggaatcaatttatggtgacaatgtcttcattcttgatagacaaaatggcctacgatcttttcagattcatatacatattgaagttcctgatgagctgacggtgtttgtaaatttaagttcctctggtgctctaggaataccagaagatagttcatctgagtgctcatactccttcaaagttgagcatttaccaccaattgtgttaacgtgtttattacctaaatcatatccgagccatcttgctcctcactttacaatctctgtccagtggttggatttggcaaaaatttcctctctttgctctatgcttgattcaatctggaaggatcaattaggtcaagaggttatataccagtgggtggagtggttgcatagctcttctctttctcattttcagtttgatcaagaaataaagttacgtttttgtgccaagagtcatattggagattgccgagcaatttcaggaactgtctcaccagaggttgatatcccctcactcaagaactatgacgaggaacaacgccatgagaatttccgtagaaacattcatcagtgttgcatatgtttcagcgaatttcctggtatggagtttgtgaggttgccatgtcaacactttttctgctggagttgcatgaaaacttactccgatatgcatgtcaaggaaggtacaatcagtaagcttctgtgccctgaggcaaaatgtggaggtatgattcctccgggtttgctaaagcggttactcggtgaagtggagtttgaacgttgggaatcaatgatgttacagaaaacgttggaatcaatgtctgatgtgtgctactgcccaagatgcgaaacaatatgtatcgaggatgaagatgagcatgcccaatgtgcaaaatgcttctatagtttttgtacattatgcaaagagaagcgtcatgtcggagttacgtgcatgacaccagaaatgaagcttcttattttgcaggagcgacagaattcatctcaactgaaagatcaccaaaggcaccgtgagaaagaaatgatcaatgagattctcagtatgaaggaaattcaccgttccgcgaagcagtgcccttcctgtaagatggctatctcgcgaactgaaggctgcaataagatggtttgcgataattgtggaacatatttctgctatcgctgtaatcagaaaattgaaggatatgagcacttcagggaggggaaatgtgaactttttcaaccagaagcaattcagatgtgggaagagaggattaatcatcgccaagtggtcggtcagattcaagctcaaatctatgctaatcatggtcatccttgccctaattgtggccaaatgaatgcaaaggttggcaataacaatcacatattctgttgggcgtgccagaatcattattgttacctttgtagaaagaatgtgaagcgaagctcccagcattatggacctaagggctgcaaacaacatactgctgaatag

SEQ ID NO: 210 - protein, 663 aa, Nicotiana tabacum
MSSSKGSRKGSKPTHYSRRQFNNQNWVIKSPLNQNPIDPIEVSKQEPISEFIPKDPKNPQNHKNSKRVSKIRRAHVVNGNFEKKEDEVDIVKQESVKEEEKSGESVEKVKVEGPVLENSGDSVEKFEGSVLYNNDVDCIWRRLEELQLSAEEPELSAEQLRINDQAQEDELLVLESIYGDNVFILDRQNGLRSFQIHIHIEVPDELTVFVNLSSSGALGIPEDSSSECSYSFKVEHLPPIVLTCLLPKSYPSHLAPHFTISVQWLDLAKISSLCSMLDSIWKDQLGQEVIYQWVEWLHSSSLSHFQFDQEIKLRFCAKSHIGDCRAISGTVSPEVDIPSLKNYDEEQRHENFRRNIHQCCICFSEFPGMEFVRLPCQHFFCWSCMKTYSDMHVKEGTISKLLCPEAKCGGMIPPGLLKRLLGEVEFERWESMMLQKTLESMSDVCYCPRCETICIEDEDEHAQCAKCFYSFCTLCKEKRHVGVTCMTPEMKLLILQERQNSSQLKDHQRHREKEMINEILSMKEIHRSAKQCPSCKMAISRTEGCNKMVCDNCGTYFCYRCNQKIEGYEHFREGKCELFQPEAIQMWEERINHRQVVGQIQAQIYANHGHPCPNCGQMNAKVGNNNHIFCWACQNHYCYLCRKNVKRSSQHYGPKGCKQHTAE

SEQ ID NO: 211 - DNA, 13231 bp, Nicotiana tabacum
  misc_feature (6373)..(9414): n is a, c, g, or t
acaacaaacccaacaaattcaaacaactttttcttttgcctctctgtgtaactctgcttttatagagacatgtacatataacagtggttactgttgggggaggggggtatgaaatgaatagaacgtgaaatgggaggcggcttttcgtgttttaacaatccggcggtggtgaaccggactgaaccggaggtaatattcacgggcagcgaaccgctcgacgaaactctaggccattccttctgctatgttaggtcatctgcccggttcgttctctctccgacaaactcgaaccggttcatttcgccttctcagtcactccggttcgataatgaaccggctccgttaaggaccgaaaccggattcagagcgatttcaggtgcttctgttagtgcaaatacctgtactccccgatctgtcctccaacttgataatatttacgacgatggtaatggtagtgttgtgaatggttttgaaagtacgtcgtcctttagtgctttacctcttcaaccggttcctcgaaccggtttaagcaacgaaccggctggtccaatggaaagagagagggctttcttcatgtccggtccgatcgagcgaggagctctatccggtccactagagtctgccgttccattctcagctccgttgggtggtgatggcatttacgtaaaaatgagaaagtcgaagggcattaatggaattgaaaaagcctttaaacggccgtgggtggtgccagtgagaaactacttcataggtaaaaaggaaattaactgtacacgtgattataatgtgaatgttgaatgggcattaggaaaagcgggggaggatcgtgtgcatgtggttgtatgtgaagaacatgggtggctgtttgttgggatttatgatgggtttaatggacctgatgcacctgaattcttgatgagtaatctgtacaaagcaatgaacaaagaattagagggtttgttttgggataatgaagatactagtagtggtagtaataaccaacaaagcgaaaaaaatgctagtttaaataatgctaatatagaaaatgaagtgatcattgaggactcgaatgaagctaattcaaatcgagtgtataaggagatgagtaggggggatggaggggtagaagaagctgaaaatgaggttaatttggatcagatggataaaacgtgtgaaaagaaggtgatatttcaatctgaaattgcaaatattgaaaatgaagtgattggtgaggactcgaatgagctacattggaatggaggacctaaggccacaagtaggggggctaggggagtagaagaaggtgaaaatgaggttaatttggaacagatggataaagggcctgaaaagagagtgacatttcaatcggggggaatagaggttaggaggaggagattgtgggaatttttagcagaagatgagacagaggatggtcttgatctttcgggttcggagagatttgcattttcagtagatgatgcattaagtgtgaatagtgcaggttcagcggttaataggaagtcgttgctgttgtcgaagctgaaacatggtttgtcaattaacaagcacaaagagagcaacaagttattcccatggagattcggattgcaagctaaaaagaaggttgaagtaggggagaatagagtggaggaaaggattgatagaagtgaaaggaagcgtaaggtgggtccggttgatcatgagttggttttgagagcaatgtcaagagctctcgaagtcactgagctcgcgtacttggatatgacagataaagttcttgatcggtaccctgagcttgcattaatgggttcttgtttgctggttgctttgatgagagatgaagatgtgtatgtaatgaatgtcggagatagtcgtgccgttgtggctcagtatgtgtctgaggaggttagttctagttctgaatcaatagttccaggcaattgcgagttggccgttgaaggcattgctgaagaatctgtagttcccagtgatgaggaatataaggcgacaaatgagatacctattcaagctatgaagctgactgccttgcaattgtcaactgatcacagcactagcattgaagaagtaacgttcctcggtttctttgttactcaatgggttgtatctggtgcttccttatatgtttgaagtttaattgatttatgagttacgacattatgctaaatattggagtacataaatattttactccgtaagaattgcaaaacttcggaatgatgaattcatgtaaattaaaagctgtttcctttatctggtgctccaaggtatgatgctatttttctcatcactggctttactgatctaagatcattgaatgtagtatgttatgaaatttgttgggatataatttctaaataaaagcctctgaagcaaagaggcctcaaagtcagtttcttgctttaattacattcatatatgtacctgccaaactggttttgaatcttttggtcacagtgtattgaaccattaaatttttgggttggcaccatttagctggtataggcaggttcttagaaacagttcagcatttgcgatagtttgaccctctcaaatggttccttttcctataatctgttattcctttcaagtcataagcttggtcctcctcattttagtaggttcattctttactgctgttgcataaatgacaataatctgaagaagcatgtatcacgcggcatgagatgctccccctttagcccaagtctctttctttgcctctctctctctcaaggattttaacgaatgtgagtgttccagattttcatgaacttgtgcttaatctctatgagtggatcaggaatgcagtcagatcctttccgatattgtttccgatgtcgtcttggtgttcattcttgattaaaatacagcacaaactgttccaaacttgtggttcacgagtcttagggatatcttagaaggtataattttgccatttagtgtaatggtgacaatgaggaaacttcataatattggtttcccttagctcccttttttgtcaatatatttgccttgtctggtattcgtttattcatctaaatgaaataatgggattggaagcttcctgtaagcttctaatataactgctcatatatatcttcttatacattaggtgccttctatacttgtattaaacattgtatcagatggagctacttcaggtgttagatatctattgatgaatctttcttttgtttctacttcttccatcttcatttattctgctcttttattcccgcatctctctattttttaagcaaattgttgtttgtaactttgtagttgcctcagaccccacatgtgggaacatactggatatgttgttgttgtttgtagttggatactggttgcagttttccttcagctacaaaattcatgtattaatgtgatgctctcaacctttttaatttttatattattttgtcttggattattggacaaagatgaatatgataaaactgctgaatgcttcaagtgagtgggttctcttcttttttttctttgttttcattttcccgtccaacattattatttggcagaaacgatgcctattgggatggatggacaactcctaccatgataaaatgattttacctgcgcttaagcgtaggacctcttggcaattgaaaagttgccctcgtctgttgtacctaagtctttttctgccagaggagttatatattaatgtcttgttgagcagtgagtgtacaaatagacgtttactaactttgatgaatattcttatttttctccattagcgacgatgcaatgcatcagattttgtactccatggaaaacaaaactcaaacagtataatgaggtagataagtaaaaaagaaaaagtgacacaaatgcctgacatatcttcattttcttgtaacatttgtgaaaggcttcaggcctcgtgtgtttgttgggccttatttatcaagacattagatgagcacaaatgatatatgttggctccaatttgaggcctgtacattcaagttgatcttttcctcttctatataaattgccccaatactaattgcagttcaatgattttgctggttgttgaatgagctaacagccgtaacagcacctatattgctgtcatgcataattctgttaactctttactctgacataaccatttctgctggccagatacggttaatgattcccgtgttgtctgtttcggttttaccaagttacaacttctcattgttgttattaaagtgtgtttgatcaatgaatgcaattggcgctgagtttctgtctcatttgtcattgtgaaacctgtaacttttaattgtctgttgcttgtaacattcccatgtttgtattttaatcagttaggttcttaaacagtttgtttcttgtaacaatctccaggaagtcattagaatcaagaatgaacacccagacgacagcaattgcattgttaatgatagagtaaaaggccgtttaaaggtcactcgcgcttttggggcgggcttcctgaaaagggtttgtcacttgcttttctttctcttcctggtttccaatccaaaaaatctctagcaattgcatcaaattgcacatctgcacattcggagcctcattttactttagatattgtggcatcagaggaatatttgactatttccatttctgatttggccgaaaatttgttgatctctgggagatggaatgtcatgcactcttagtcctagcattccatctagtaaagaaatatatgtttctgcctatagttactctggatggacatgtaaagttcgccaaacattctacgttgaattgttgttgtagacttatattctgttgtgacatgcttgttgccaatccgcttaatattttgagatctgcctgtgcagcctaaattgaatgatgcattactagaaatgtttcggaacgagtacattggggatgctccttatttatcttgtaaaccttcactgcaccatcatagactctgtcctaaggatcagtttttggtgctatcctctgatggcttgtaccaatatttgagcaatcaagaggtggtttgtcatgtggagaatttcatggagaaattccctgatggggatcatgctcagcatcttattgaggagctcttattccgtgcagccaagaaagctggtatattttctgtctagtctttctatgcagagttagggtaaaaagttactgttttagtgattctttacgttttctagtggctgcacgcccttaatttttgctaagaaattacatttagattttcagatttttatttttatttttattttcagacactcaatcatcttctcttgctgtccaatttagatcaattctatattaggtgggaacactaaattggacccactccaattttgtgacacattaacatacctgaaggtgttggtttatgtttagtcaataatggcatgccaattggaagagttggtgtggatgctaggaggaagcttcctcctttgatgtcaaccatgacatcaagaggaggtagtttgatgtcaccaatgacatcaagaggaggtctttacctctataaatagatgcactccttcatttgtagaaaccatcccaaaaataatacaacacattgtagtgagtagagagttaagagagaaattctcttaagcgtaattgggaactctccccttcctttgttaatattaaaaaggcaactgttctctggtggacgtaggattattttgatccgaaccacgttaaatcttgtgttctttcttttacgtttccgctaacaattggtatcagaacaacaggattctttaacgatccaaggaggaagaacaagcaaagatgagttccatgaagtttgaaattgatagattcagtggacgcaacaatttcaatatctggaagatccaaatgatggcgttactgcggaggaaatgttcaatccatgctattgacggaaagtatcctaaggatatatcagctcccgacaaggagaagattaaaggggatgcattgagtgcaatccaactatcccttgcacctaacgtgctttgtgaagtgagtacgggtaccgaagagacggccaaacagttatggaaaaagctagaagggctataccaagaccgattagtgacaacaaggatgttgttacaacgacgtcttcacacatttaaaatggggtcaggtacttcgttacaagatcatttagatgcgttcaataaacttgtcatggacttacagattgcaggaattaaaaaggaggaggagacgcttgcatgtgctttgctattttcattgatttcaggatatcgtgatattgagaattcaatgatgtatagcaaggagcctatcaagcttgagcaagtgcagtaggcacttaactctnnnnnnnnnnnnnnnnnnnnnnnnnnnnnnnnnnnnnnnnnnnnnnnnnnnnnnnnnnnnnnnnnnnnnnnnnnnnnnnnnnnnnnnnnnnnnnnnnnnnnnnnnnnnnnnnnnnnnnnnnnnnnnnnnnnnnnnnnnnnnnnnnnnnnnnnnnnnnnnnnnnnnnnnnnnnnnnnnnnnnnnnnnnnnnnnnnnnnnnnnnnnnnnnnnnnnnnnnnnnnnnnnnnnnnnnnnnnnnnnnnnnnnnnnnnnnnnnnnnnnnnnnnnnnnnnnnnnnnnnnnnnnnnnnnnnnnnnnnnnnnnnnnnnnnnnnnnnnnnnnnnnnnnnnnnnnnnnnnnnnnnnnnnnnnnnnnnnnnnnnnnnnnnnnnnnnnnnnnnnnnnnnnnnnnnnnnnnnnnnnnnnnnnnnnnnnnnnnnnnnnnnnnnnnnnnnnnnnnnnnnnnnnnnnnnnnnnnnnnnnnnnnnnnnnnnnnnnnnnnnnnnnnnnnnnnnnnnnnnnnnnnnnnnnnnnnnnnnnnnnnnnnnnnnnnnnnnnnnnnnnnnnnnnnnnnnnnnnnnnnnnnnnnnnnnnnnnnnnnnnnnnnnnnnnnnnnnnnnnnnnnnnnnnnnnnnnnnnnnnnnnnnnnnnnnnnnnnnnnnnnnnnnnnnnnnnnnnnnnnnnnnnnnnnnnnnnnnnnnnnnnnnnnnnnnnnnnnnnnnnnnnnnnnnnnnnnnnnnnnnnnnnnnnnnnnnnnnnnnnnnnnnnnnnnnnnnnnnnnnnnnnnnnnnnnnnnnnnnnnnnnnnnnnnnnnnnnnnnnnnnnnnnnnnnnnnnnnnnnnnnnnnnnnnnnnnnnnnnnnnnnnnnnnnnnnnnnnnnnnnnnnnnnnnnnnnnnnnnnnnnnnnnnnnnnnnnnnnnnnnnnnnnnnnnnnnnnnnnnnnnnnnnnnnnnnnnnnnnnnnnnnnnnnnnnnnnnnnnnnnnnnnnnnnnnnnnnnnnnnnnnnnnnnnnnnnnnnnnnnnnnnnnnnnnnnnnnnnnnnnnnnnnnnnnnnnnnnnnnnnnnnnnnnnnnnnnnnnnnnnnnnnnnnnnnnnnnnnnnnnnnnnnnnnnnnnnnnnnnnnnnnnnnnnnnnnnnnnnnnnnnnnnnnnnnnnnnnnnnnnnnnnnnnnnnnnnnnnnnnnnnnnnnnnnnnnnnnnnnnnnnnnnnnnnnnnnnnnnnnnnnnnnnnnnnnnnnnnnnnnnnnnnnnnnnnnnnnnnnnnnnnnnnnnnnnnnnnnnnnnnnnnnnnnnnnnnnnnnnnnnnnnnnnnnnnnnnnnnnnnnnnnnnnnnnnnnnnnnnnnnnnnnnnnnnnnnnnnnnnnnnnnnnnnnnnnnnnnnnnnnnnnnnnnnnnnnnnnnnnnnnnnnnnnnnnnnnnnnnnnnnnnnnnnnnnnnnnnnnnnnnnnnnnnnnnnnnnnnnnnnnnnnnnnnnnnnnnnnnnnnnnnnnnnnnnnnnnnnnnnnnnnnnnnnnnnnnnnnnnnnnnnnnnnnnnnnnnnnnnnnnnnnnnnnnnnnnnnnnnnnnnnnnnnnnnnnnnnnnnnnnnnnnnnnnnnnnnnnnnnnnnnnnnnnnnnnnnnnnnnnnnnnnnnnnnnnnnnnnnnnnnnnnnnnnnnnnnnnnnnnnnnnnnnnnnnnnnnnnnnnnnnnnnnnnnnnnnnnnnnnnnnnnnnnnnnnnnnnnnnnnnnnnnnnnnnnnnnnnnnnnnnnnnnnnnnnnnnnnnnnnnnnnnnnnnnnnnnnnnnnnnnnnnnnnnnnnnnnnnnnnnnnnnnnnnnnnnnnnnnnnnnnnnnnnnnnnnnnnnnnnnnnnnnnnnnnnnnnnnnnnnnnnnnnnnnnnnnnnnnnnnnnnnnnnnnnnnnnnnnnnnnnnnnnnnnnnnnnnnnnnnnnnnnnnnnnnnnnnnnnnnnnnnnnnnnnnnnnnnnnnnnnnnnnnnnnnnnnnnnnnnnnnnnnnnnnnnnnnnnnnnnnnnnnnnnnnnnnnnnnnnnnnnnnnnnnnnnnnnnnnnnnnnnnnnnnnnnnnnnnnnnnnnnnnnnnnnnnnnnnnnnnnnnnnnnnnnnnnnnnnnnnnnnnnnnnnnnnnnnnnnnnnnnnnnnnnnnnnnnnnnnnnnnnnnnnnnnnnnnnnnnnnnnnnnnnnnnnnnnnnnnnnnnnnnnnnnnnnnnnnnnnnnnnnnnnnnnnnnnnnnnnnnnnnnnnnnnnnnnnnnnnnnnnnnnnnnnnnnnnnnnnnnnnnnnnnnnnnnnnnnnnnnnnnnnnnnnnnnnnnnnnnnnnnnnnnnnnnnnnnnnnnnnnnnnnnnnnnnnnnnnnnnnnnnnnnnnnnnnnnnnnnnnnnnnnnnnnnnnnnnnnnnnnnnnnnnnnnnnnnnnnnnnnnnnnnnnnnnnnnnnnnnnnnnnnnnnnnnnnnnnnnnnnnnnnnnnnnnnnnnnnnnnnnnnnnnnnnnnnnnnnnnnnnnnnnnnnnnnnnnnnnnnnnnnnnnnnnnnnnnnnnnnnnnnnnnnnnnnnnnnnnnnnnnnnnnnnnnnnnnnnnnnnnnnnnnnnnnnnnnnnnnnnnnnnnnnnnnnnnnnnnnnnnnnnnnnnnnnnnnnnnnnnnnnnnnnnnnnnnnnnnnnnnnnnnnnnnnnnnnnnnnnnnnnnnnnnnnnnnnnnnnnnnnnnnnnnnnnnnnnnnnnnnnnnnnnnnnnnnnnnnnnnnnnnnnnnnnnnnnnnnnnnnnnnnnnnnnnnnnnnnnnnnnnnnnnnnnnnnnnnnnnnnnnnnnnnnnnnnnnnnnnnnnnnnnnnnnnnnnnnnnnnnnnnnnnnnnnnnnnnnnnnnnnnnnnnnnnnnnnnnnnnnnnnnnnnnnnnnnnnnnnnnnnnnnnnnnnnnnnnnnnnnnnnnnnnnnnnnnnnnnnnnnnnnnnnnnnnnnnnnnnnnnnnnnnnnnnnnnnnnnnnnnnnnnnnnnnnnnnnnnnnnnnnnnnnnnnnnnnnnnnnnnnnnnnnnnnnnnnnnnnnnnnnnnnnnnnnnnnnnnnnnnnnnnnnnnnnggccgtcgtgcaagacctctttccccgccacttatacctttgcaaactttactcttgcctccatttccctgaaagtgaccatcttttctcaaattgtattttgtagacagatggatacatgcagagtcccaagaaagccagtgcagcgaaacctgtcttgcccgcgtttcaccaaaatttttttgccatgtggtgacatcttctcatcatattcgaataaccaaggggccgcttgagaaagctataagaatcgataacctaacgccacggccaaaaactgtcaagcagaaggagtttttccctgataaatcgtcccccgaacatcaagttgtcacaagagccgccacatgggtccaattagacatttcttgtacgctccctttcaatcatgccaccctgcatttcttaattgtctcacttgctacttatcagtgaccactttgaaacaactttgcttggaccaaaatctttatccgatgcgatattcctgaaatcaagagtgaaccattttgatgtgccctgtcagtggatgacgtcacctagctatcaatggactcaaagaaacaagctttccccgggcgagaattcaccaccaacacattataatcattattccccgttctgccgatccacttatccatcataatgaacagcgccgacttgggttccacacacttaagctgcagctcaaccaattttattggtctccttccacttcgcttatttagattaaggatcctcttatttacatggtaaatgtggaggcttccatttccagtcacgttattgtaaccaaacggcctcaatataaagtctccaaaaaagtgtcataagttggaccacaactgaaggggagcccggcatcatatagacccatcgtgcaaaaagcctaaactaaccgcatgctacgatccctccaaaatgtctttagcaatttttttgtacatcttttccaccggccctttgctcccggcttctttgaggaatgtagccaattccatgagactttagtcgaagatccagacttgacccattctcttcccgtttgtttgggaagttgacaattctattcaatatcatccatcattcatcatttcatcatcaagatatggccatccattggttaatgaaccattgattttttttgctccttcttctcttccaacaaaattctttaatttcttccctcactccggggacatttatcggacaattgtgacgtttctatcgccaccaaattagaagatgcgctatttaaacaagtaaaatgccacccgttgtaatcttgttgcaaaacttgcatctaccaacatttatattcttctcattagttctctcgccaatatccaagccgggtctttctctttcgaactttgagacattttaatatccctattatttaagatataagaaaaaaaacataatcaataaactgaaaatacatataataataatatatataataattaattatataaactgaaaaaaaacatttaaaaaatcacataaactaaaaataataaatatatataattaattttatatgctgaaatataataagtaataacgcagaagcagaagaagcagcagaagcagaaaaagaagcaacagaagcagcagaagaagaagcaacagaagcagaagcaaaagaaaaaaaaattctgaaaaataagcagagaagcagcagaagcagcagaagcagaagaaaaataagaaaggagaaggagaaaggagaagaagaaatgaagaagaaaggagaaagaaattacctggaccggtcgactggagaagcagtggtcgagcttgagcttgagagagaaggggtcaaccctaggcctttgtcaatctttgtttaattgttttgacgggagaagcagtgtgactatgtaggggtctattttgtataattaaaaaacagaccccaagtttgttttttttataaaaaagggccagttatcgctttttgtaaagaagcgatcgcttcgttgatttcgtcgcttcatcgcttcgtcgcttcagctagtgaagcgcgcgcttttcaagatcgcatcgcttcgagcagcctgaagcgatacactgtcgcttcgcgtcgcttcgcgtcgcttcgcgctttaaggacgaagcgatcgcttttctaaacactgacaataccattgcttattctggatttatgaccagattatccgccatagcttagtttgtttgtctacttctctttaactgatgaaacaaagatacgtctcgaggtttgggaaacatctttatcgtttactcgtttaagctgctgcactagctgtgacatttgataactataaaaagcctatgtcaagaatattgttttgcactgtttagttagatttgtaagcctctgaatagtacattatattctaattgaatcgtactagtcttcagtgctcaccctctgacttgggtctgtggaatgtggaagtctattcttttggggaagaaacattagtataagactacattaaattggtaatataactcaccccttccgtgggtgaaaaagtcccaagctcatccatcaaccaaatattgcagcaaagtatactcccttaggcaggtgtccatgtaaagccttggtaaatgtcttcctatctgtaatttgagtttttgcacctttgtttttcttcaacacctagttctttggatcacttggtggatcgggcgtatcaatgtagtgtagaaattgatagatgacattgtcaagatcttggtaaccctcttgctaaagaggggaagacatgacatagatgatttgtttcgtagcatagctgttcagggatttcaagatcagctgtcaatcttcgttttctagaaaatgtggcatgagatccccaactgatctgtctgaatatctagaagctgatgaatcatcaagctgttttcttctcttaaatgcgaattttaacatcaatcaactatgtctcaatcccaaactaggtgattgggtccctcgtatgaattctgggcacccttaatttaaagaaagtccttttacacaactccagatgatgtcataggtttcatatcactttctgaaacacaaggactactacatatcatttcatatcattagtttctcatttagtggcatcttatttctctaccattttattttatgtatttttgcggtttaggtaaactatgatttctaaatctctgatttcatggttatcttatgatggcgtctctaaatgattggcatgcaaatattacatgtttttaaattgaattgttaatgttttcttataggaatggaatttcatgaattgctgaacatcccccagggagatcgtaggaagtaccacgatgatgttactgttatggtggtatctcttgagggaagaatttggaagtcatctgggaaatacatctgagtttttacaatttccatgtatagtggtgctgcaatttagatcccttgagctgggatgttgggaacagtggtggaagctggacagtcgcttaatttcactgttccagttgtacccttgacaacagccaaaagtagtgctagaaatacgacaaggctcgtgaaaagtagaaatttagtagctgggattgctcagaactgctcctagaaaagaaagaaacaggatctcttcatttagtttctttttagattttgcacagtagaatagatctttccattctttcaagttctttctttctttttgcccccatctcatctactctttagagccacagtgattttgaccaggtgggcggcttagttactgagttttagccgatatatctgtattatggattcggtttacagaggagagttctt

SEQ ID NO: 212 - DNA, 2496 bp, Nicotiana tabacum
atgggaggcggcttttcgtgttttaacaatccggcggtggtgaaccggactgaaccggaggtaatattcacgggcagcgaaccgctcgacgaaactctaggccattccttctgctatgttaggtcatctgcccggttcgttctctctccgacaaactcgaaccggttcatttcgccttctcagtcactccggttcgataatgaaccggctccgttaaggaccgaaaccggattcagagcgatttcaggtgcttctgttagtgcaaatacctgtactccccgatctgtcctccaacttgataatatttacgacgatggtaatggtagtgttgtgaatggttttgaaagtacgtcgtcctttagtgctttacctcttcaaccggttcctcgaaccggtttaagcaacgaaccggctggtccaatggaaagagagagggctttcttcatgtccggtccgatcgagcgaggagctctatccggtccactagagtctgccgttccattctcagctccgttgggtggtgatggcatttacgtaaaaatgagaaagtcgaagggcattaatggaattgaaaaagcctttaaacggccgtgggtggtgccagtgagaaactacttcataggtaaaaaggaaattaactgtacacgtgattataatgtgaatgttgaatgggcattaggaaaagcgggggaggatcgtgtgcatgtggttgtatgtgaagaacatgggtggctgtttgttgggatttatgatgggtttaatggacctgatgcacctgaattcttgatgagtaatctgtacaaagcaatgaacaaagaattagagggtttgttttgggataatgaagatactagtagtggtagtaataaccaacaaagcgaaaaaaatgctagtttaaataatgctaatatagaaaatgaagtgatcattgaggactcgaatgaagctaattcaaatcgagtgtataaggagatgagtaggggggatggaggggtagaagaagctgaaaatgaggttaatttggatcagatggataaaacgtgtgaaaagaaggtgatatttcaatctgaaattgcaaatattgaaaatgaagtgattggtgaggactcgaatgagctacattggaatggaggacctaaggccacaagtaggggggctaggggagtagaagaaggtgaaaatgaggttaatttggaacagatggataaagggcctgaaaagagagtgacatttcaatcggggggaatagaggttaggaggaggagattgtgggaatttttagcagaagatgagacagaggatggtcttgatctttcgggttcggagagatttgcattttcagtagatgatgcattaagtgtgaatagtgcaggttcagcggttaataggaagtcgttgctgttgtcgaagctgaaacatggtttgtcaattaacaagcacaaagagagcaacaagttattcccatggagattcggattgcaagctaaaaagaaggttgaagtaggggagaatagagtggaggaaaggattgatagaagtgaaaggaagcgtaaggtgggtccggttgatcatgagttggttttgagagcaatgtcaagagctctcgaagtcactgagctcgcgtacttggatatgacagataaagttcttgatcggtaccctgagcttgcattaatgggttcttgtttgctggttgctttgatgagagatgaagatgtgtatgtaatgaatgtcggagatagtcgtgccgttgtggctcagtatgtgtctgaggaggttagttctagttctgaatcaatagttccaggcaattgcgagttggccgttgaaggcattgctgaagaatctgtagttcccagtgatgaggaatataaggcgacaaatgagatacctattcaagctatgaagctgactgccttgcaattgtcaactgatcacagcactagcattgaagaagttcttaaacagtttgtttcttgtaacaatctccaggaagtcattagaatcaagaatgaacacccagacgacagcaattgcattgttaatgatagagtaaaaggccgtttaaaggtcactcgcgcttttggggcgggcttcctgaaaaggcctaaattgaatgatgcattactagaaatgtttcggaacgagtacattggggatgctccttatttatcttgtaaaccttcactgcaccatcatagactctgtcctaaggatcagtttttggtgctatcctctgatggcttgtaccaatatttgagcaatcaagaggtggtttgtcatgtggagaatttcatggagaaattccctgatggggatcatgctcagcatcttattgaggagctcttattccgtgcagccaagaaagctggaatggaatttcatgaattgctgaacatcccccagggagatcgtaggaagtaccacgatgatgttactgttatggtggtatctcttgagggaagaatttggaagtcatctgggaaatacatctga

SEQ ID NO: 213 - protein, 831 aa, Nicotiana tabacum
MGGGFSCFNNPAVVNRTEPEVIFTGSEPLDETLGHSFCYVRSSARFVLSPTNSNRFISPSQSLRFDNEPAPLRTETGFRAISGASVSANTCTPRSVLQLDNIYDDGNGSVVNGFESTSSFSALPLQPVPRTGLSNEPAGPMERERAFFMSGPIERGALSGPLESAVPFSAPLGGDGIYVKMRKSKGINGIEKAFKRPWVVPVRNYFIGKKEINCTRDYNVNVEWALGKAGEDRVHVVVCEEHGWLFVGIYDGFNGPDAPEFLMSNLYKAMNKELEGLFWDNEDTSSGSNNQQSEKNASLNNANIENEVIIEDSNEANSNRVYKEMSRGDGGVEEAENEVNLDQMDKTCEKKVIFQSEIANIENEVIGEDSNELHWNGGPKATSRGARGVEEGENEVNLEQMDKGPEKRVTFQSGGIEVRRRRLWEFLAEDETEDGLDLSGSERFAFSVDDALSVNSAGSAVNRKSLLLSKLKHGLSINKHKESNKLFPWRFGLQAKKKVEVGENRVEERIDRSERKRKVGPVDHELVLRAMSRALEVTELAYLDMTDKVLDRYPELALMGSCLLVALMRDEDVYVMNVGDSRAVVAQYVSEEVSSSSESIVPGNCELAVEGIAEESVVPSDEEYKATNEIPIQAMKLTALQLSTDHSTSIEEVLKQFVSCNNLQEVIRIKNEHPDDSNCIVNDRVKGRLKVTRAFGAGFLKRPKLNDALLEMFRNEYIGDAPYLSCKPSLHHHRLCPKDQFLVLSSDGLYQYLSNQEVVCHVENFMEKFPDGDHAQHLIEELLFRAAKKAGMEFHELLNIPQGDRRKYHDDVTVMVVSLEGRIWKSSGKYI

SEQ ID NO: 214 - DNA, 9216 bp, Nicotiana tabacum
cataaaacaagtttcctacaaaattagggcacgacgaaaaagcacaccaattcactaattattcgcaaatttggggaaattccttgaagatgacgagaatttctctacgttattctcttaatggtatttcctttatctcatccttcactatttcctattctgctatggcaattacaaccagatattactcttcatatcatagcaatacacccatttccataaatggtcgtagtaaaaaacataggtttactaacaagtttgagaatatcaaatgtttagatgatgctgtgaatctcttcaatcaaatggtcagaacacagcctcttccctctgttatggacttttcgaaattatttaagattatgataaatatgaagcattattctgttgttgtttctaattttggagaaatgcagaaattaggtatcccgattgataaagtcatgttgagtatggtgactaacagttattgcctaatgcatcgtgttgattgtggattttcaatgttagccatttactcaaagtgtgggattccatttgatgttgtcactttaaccatcctaataaggggactctttgctgaaaacaaggttaaagatgcagttaacttgtttaaaaagttaatgagagagaatatttgtgagcctaacgaagtcatgtatgcaactgtaatgaatgggctcggtaaaaggggtcatattgagaagacttttggtttgctccggctaatggaacaagggagcactaagcccactacatgcatctacaacgttgttatagatgccctttgcaaaaatggaaatctggatgtcgctgtcgaccttttgagcgagatgaaactgaaaggcattcctccggacttattcacatataattcgttgattgatggtttctctaagtttagtcagtgggaaaaggtcaggaatttgttctttgaaatggtaaatcataatatttatccggatatattcacattcaacacagttataaatggactatgcatagaagggagggttaaagatgccgaaaaagtaatgagacagatgatcgaaaaaggtgtagagcctaatgtggttacttacaatgtgataatggatggatattgcttgcgtggtcaaatggatagatgtaggagaatctttggttccatgaaagataaaagcattgagccggacaatattagctatgcaatattaataagtggatattgtaagaaaaagaaattggatgaggccatgcatttgtttcttgaaatttctcaaaagggatttgaacctgatatttttacctgcaatactatcttgaaaggtctatttgaagttggaagaattggggcagcgcaaaaatattttgatgagatgctatctgcaaggataatacctggtccaatcacttattgcattttgcttgatggttattttaagaatggacttgttgacgaagctatgttactattttataagttggaaagaaaaagagaagatactaatgttgacctctataatgccgtcattgatggattgtgcaaaaatagaaagttcgacaaagctcatgatgtttttaagaatctttctctaataggtttacatcctgacgtgataacatacactattatgattaatggattttgtctagaagggttgttagatgaagctaaaggtctgctaagaaagatggaggagaatggttgtttgccaaacagtgtaacttacaatgttattgtgcaaggatttctcagaagtaataaaattagtgaaatgaaggctttcttaaaggaaatgaatggaaagagcttctcattcgactcaactacagtaactcgactggtagacattatagcggaggattcttctttgcttgacttgatatcagattttatcccagaaaacaagaagttattatctattttgcttggttaattcaattacattagttatagagtgaaagtttttttctttttcttttcctctggaaatgaagtcgcgtgcaacgcaattggggaaactgaaaatatgacaattggagcattacttgagctttccagacaaacctattgaggaggtaaattattttttcttgatagattattaataaggtaaattacttcttagttttgattttgttgtcgctcgttatctttgatagtagatgttattgtattcttaacatgagaaataatgtataatctccttatgttaatgttttctattcgtactttttgaatttgctatatagtgtataagtgttgctgtccatgctcagctttttacttcgtggctttttatttttcagcttaagtgcatgatacctttattctttttaacagaaagagaatttgtcctcatattgagaaaaaaactgaaattattgaatcagttatactagttatctccttggaagggtctagtttattgtaggctgcatcaaagctagtgaagttgttcttgttttcttttcctttttttagatttagactccaatcactcttcatttatatgaattactgtgataattaccaagatatagtgatctaataaatctattcgaacatatggttgttcttggatgtctgcacataccccaaaatattggttattagaagctgtggttctgacaccatcacttgacatatacacctcatggtcatgtttgagtgtaataacatacgttttaaaggatgctgcaaaagaacactgtggttgtggtttctagcggatgtataactagtatttgggagtgttgtatatttttatgcttttgacatggaaaccccagaaccttccctcaggtttgagtgtaataacataccttttaaaggatgctgcaaaggaacaccgtggttgtggtttctagcggatgtataactagtatttgggagtgttgtatatttttatgcttttgacatggaaaccccagaaccttcccctccccccccttcccccctcttcccccggaccaactgtggctttcccgcttgctccattggtgatttgaaccccaacctaatggtcggatgtggattgggtgtgctatgttttatgttactcaggcaaagatctagtgaggctgcgacataccacaacaaagtgtttgaccgctctaattaccctgtagttcaaccacaatttcagtatgtaagtagctgaccaaatgattagttgatgctattaatttgatagtgacgatcccgtaagcgatatgtatgccattacatcacttttggaatttttagactttatcgagaacaatcaagatggtgttgtggaccacctgtcctataggaatgctgctttttttgctttgatgttcaatacataaatttgttacagcttgtgcttgacctagtatattaaggttggggaactgttttgagaatttcgctaaaaacaaaactcatctacttgggttggctttatttgtattctttttcttgataaggtggttggctttaattgtatgaggctgttgttgatcaagtgataagttggttgtctttatttgtatgagcctgttgtcaattaagtgctagacttttctctacttgaggtggcttacttgtatgccgcagtttctgcacttgaggctattgttattctgctcccgtaacttgtctgtttggaaggtactttgacgtttatatcttcatgttcttaatcttttgcatcaggagcgacaaaattcatctcaactgaaagatgaccaaatgcactgtgagaaagaaatgatcattgagattctcagcatgcgggaaatgcccttcctgttaaatggctatctcgcgaattgagggctgcaataagtggtgtccaataactgtggacaatatttctgcttatcgctgtaatcaggcgattgatggatatgagcacttcaggttggtacaagtttcgactggagaatggcttcacgtatcgtatgtcctcagtctgtgaccttgatatttcatttgtattcttatttgaggagctttttctcgttaaagggatgggaaatgtgaaccttttctaccagaagcaattcagatgtgggaagataatgagccaatttctcggtcagattcaagctgaagtctctttcagattgtggtcatccatgcccaaatattgccaaatgaatgtgcaaaggtaagatgagttctcaatatttttttccttaaaaccgctgcatcacaactgatatatattttgaagttgaaataataatgaagaatgagttataaacactgttggagaaaaggaaatgatgagtgtctgcataattgagctttttctagacactgtaaagtaaaccgttggcttcagaagcatctcaaatgtatataggctttgaatgggagaagtagatagcacttggacaaacatcatcactggatttggttgtttattcattcctttcctggtaaaactagtattagtacccgcgcagatgcgcggacattaatcatataaaatattgaagttatttggattgtatgtaaataatcttaaaatttacactttcttaagtaaatatagataatgattgaatattaactacatgaaaaaaattaaccatttattctatttttttttaataccattcttgccggtgtcattggatcctaaaaatagtcaggaagcaaaataataactcatatttatggcaaaacaatcaaattttgagacaatgaattactctttggataagatttaactcttttactactacttgaactcttatttggtgtgttgatatctcttaaaaaatatttctttcttaaaatttcagtttctaaaatattatttttcaataataactatttttataataatgtaattgaaaatattattcttaattcaaaactcattttagttggctatttataaaaaattatttagctagtgaatttgttttactccattttgacatttgacattaaccatgttaaatatctgagttatttgaattatatgtaaataaccttaacatttaaaccttctaaataattatagataatcgtcagatattaattaagaaacactacatgaaaaagactaacattttctcaattctcgtagtgataattttatttttgcactattatcataggtgtcattggaacctaaaaatagccacatagtgaaataataactcatatttatggcaaagcacaaaggttgacacgatataaatgattctttgattacgacatgactcttatactatgacttgaactcttatttggtatgattttatcttttaaaaaatatttctattttgaaattttaatttctaaaacttatatatattataataatgattatctttataatgatgcaagtgaagatattatccttaatttaaatttcactttaattcgctatctaaaaatttaaatgattctttggccggatttatttcagcatgactccactttaagtctgtcgatatctctagccccaaaattttaatttttaatatcctatatatacaaaaattttattctttgaatcatcaaatgttaaattagttgattattattataaaacattgcatatattgtcttaaaattgttaagtaatttattttttgacactatacttggcttaacctcaatgcaaactactcaaattgcattccaattcaaatttgaatatcatatcagtttgttagtaatagtaattttttaaaaacgacacataatttaaataaaaaaaatttaagatatccttatcttataatctatgtatttgagttggaaaaaaaaattaaaatcgatgagattaactttcaaattttttatactcaacaaagatgaaacataagaagaaatttgttgtcatcttttatttctcatttttagatctttctaacatttttttcaatatttatttcttttatcttattttttatgtcattatttcttttgttacaaaaaattaatttatttcaatataaaaggatgagttttaataaaaattgtctacatatgaactttaattatatttttagtctttggttgaaattgtttcatatttttcttttggatttatctaatcagcctaaataggtgctcacttgaccacttaaattaaaaaattaaatgatgtgtaatttatatataatccatatataatatgtgtataatcgtgtgttgtcggtatatcatctatttatattagctataaaaagtaaacaataaatatggccggatattatgtaaatattccataagatttcgattttttgagtttatccatgatatatcttctattataataattttaaaactctctactaatgttcaaaaatattttatctttttattatctttgaattaaaaaaagtaaagagttttttcgaaataatttatttacattttttaaaaaatatttcacgccataccaattttttctttatatatactctttgttacacttaaaaatcgctatagaaaccaatttatcttttgttgagtttgaaaaaaaagcctttcacataatctaatgattcaaaactaatattcttcaacgaaaaaaatattatacccttgcaatattggcttgactacagctaaatgaaggggtttcggcttatacccttcaattccttgaatgtgctaaattgaaattaatgatagcaattgtatagccaaagttttattatttgtttgatgtccatttatgcaaattgactcttcaaacaaatattcttcaagaagaaaaaataaacaacttttttttttttttaatattgactgattttgtgatgtttctttctccagcatgtatgtttactttattatatatgtaagtaaacttttatttggttttgtatacttttttttgttatttagataaacatagacgtgtaccctatatattacatttattctaaaagaatttcgttttactatacttataggattttaaatgtgaaagagttttataattatatgaaatagtttttctttgctagaggcgaagtagtatttaaataattagaaaaaataacaaaagttcctaacatgattgcatatgatcattaaccgaattaagtatgataacattataaaaaaagataaattttatttttaatttaaattcaaattttagaactttatctataaattcaaaattatattttaattcaaattccgtatatatatatatatttgtatttaactaaaatagtcaaatatagaataaagttaccatatattattgacatttattagcttgccacttgacttaaccataatgtcatttatatatggtaactttcttgctttaatatatatatagattgatcaaagacagtagtagtgttgagcagctctccttgagaagctacttctaggtctgtagtttttcatatttatggatcagtttatgataaataattagcaaaatagtcgcactgatagatttaagaagcacttcagctattttcagatgataaaatttcattgtcgaatgagtagattatacatagaggcaggcaacagagttttccaggaccatacctattagatcagtaagaaagaaaattgtgtcggattttggtaattcactataaatcagagtgatgttttctttcatgaagtggccttcaaagacatggcacttaatgtgtgtacatattttttttttttggaacatttcactcctcatagttgtctggcctataaggctataactagagatgaatttattcggacttcttttagcctcattttttcctgagtagtatgatgatcaaactcatagttgtcgtatttgattattctgtaagcactgttttgcattttaacaacaatttttacacgtgttgtgtgcatgattggttgcaaaagtatattaacctaactaatttcagttttttttttcttttgaaattttgggttatttctctggccaatacccattccagtagttgtatcaattgtaaaatactcaagagttgccttttctttcatatactttttttttgctgtcgtccacaaattttaaattgcagatagagctattctcttcaaactgtagacggaactttcaaagagactttcttttacaaaaaaaattcttttgataaaggactatcttttacattttatttataaaattgtgtttcacaatgccattgaaaagatattaggaagatttttttcccaattgggagctcataaaactagcatacaaactttttggatctactagctagagttgtcaaaagtgaaaagcaccaaagcgcaaagtttgttggagctttaagtgcaataaaagcatgggctttagcgaaaaagtgccaatgaggaaaaataaaaaatagaaatggatgcaagaaaatataactataaacacaaacaataattaattggacaaaagaatgaaaaaactataattaagcttttagggatcgtttggtagagtgtgtaagaatagtgcggaataaggtgtattagtaatgcatgtgtttgtaatgcaagcattaattatgcagatattatttcttatttactgtttggtgtggtgtattaaaattataatgcattacataatttttaagaaaaatagttgtttacaaaaatgccctccatattctctagctttaagggactttaaggataatttcgtctttaaccatactaatgcatgcgttaatagtcttggtattactaatgccaaatacataggataatatcaagtatgatgtatagagctaatgcttgcattattttttctaatacctcctaccaaacgacccttgttgtgtacttaaagacagaatccatcagtaaggtgcacaagccttagcaccttaacacctacactaaagcgcaaattacccaaggcgaagcacacaccaagcttcagtgcttaagtgccctttaagcgagcctataacaacactacaactagcttaatagaaattcttgcatatatgtaagcaattttggttccttctattgagtttatgtaagaactcataatcttattcgcttcagcttttctttttattcacaggaaccttcgcctcatctacttttgtagtttacaatctttttttccagtctttgaacagatctattctcttcattttccctctttctgttttttattgtaaccaagttgtacccctttttccttgtcgtcgtcacaggttggcaataacaatcacatattctgctgggcatgccagaattattattgttacctttgtagaaagatgctcgct

SEQ ID NO: 215 - DNA, 1830 bp, Nicotiana tabacum
atgacgagaatttctctacgttattctcttaatggtatttcctttatctcatccttcactatttcctattctgctatggcaattacaaccagatattactcttcatatcatagcaatacacccatttccataaatggtcgtagtaaaaaacataggtttactaacaagtttgagaatatcaaatgtttagatgatgctgtgaatctcttcaatcaaatggtcagaacacagcctcttccctctgttatggacttttcgaaattatttaagattatgataaatatgaagcattattctgttgttgtttctaattttggagaaatgcagaaattaggtatcccgattgataaagtcatgttgagtatggtgactaacagttattgcctaatgcatcgtgttgattgtggattttcaatgttagccatttactcaaagtgtgggattccatttgatgttgtcactttaaccatcctaataaggggactctttgctgaaaacaaggttaaagatgcagttaacttgtttaaaaagttaatgagagagaatatttgtgagcctaacgaagtcatgtatgcaactgtaatgaatgggctcggtaaaaggggtcatattgagaagacttttggtttgctccggctaatggaacaagggagcactaagcccactacatgcatctacaacgttgttatagatgccctttgcaaaaatggaaatctggatgtcgctgtcgaccttttgagcgagatgaaactgaaaggcattcctccggacttattcacatataattcgttgattgatggtttctctaagtttagtcagtgggaaaaggtcaggaatttgttctttgaaatggtaaatcataatatttatccggatatattcacattcaacacagttataaatggactatgcatagaagggagggttaaagatgccgaaaaagtaatgagacagatgatcgaaaaaggtgtagagcctaatgtggttacttacaatgtgataatggatggatattgcttgcgtggtcaaatggatagatgtaggagaatctttggttccatgaaagataaaagcattgagccggacaatattagctatgcaatattaataagtggatattgtaagaaaaagaaattggatgaggccatgcatttgtttcttgaaatttctcaaaagggatttgaacctgatatttttacctgcaatactatcttgaaaggtctatttgaagttggaagaattggggcagcgcaaaaatattttgatgagatgctatctgcaaggataatacctggtccaatcacttattgcattttgcttgatggttattttaagaatggacttgttgacgaagctatgttactattttataagttggaaagaaaaagagaagatactaatgttgacctctataatgccgtcattgatggattgtgcaaaaatagaaagttcgacaaagctcatgatgtttttaagaatctttctctaataggtttacatcctgacgtgataacatacactattatgattaatggattttgtctagaagggttgttagatgaagctaaaggtctgctaagaaagatggaggagaatggttgtttgccaaacagtgtaacttacaatgttattgtgcaaggatttctcagaagtaataaaattagtgaaatgaaggctttcttaaaggaaatgaatggaaagagcttctcattcgactcaactacagtaactcgactggtagacattatagcggaggattcttctttgcttgacttgatatcagattttatcccagaaaacaagaagttattatctattttgcttggttaa

SEQ ID NO: 216 - protein, 609 aa, Nicotiana tabacum
MTRISLRYSLNGISFISSFTISYSAMAITTRYYSSYHSNTPISINGRSKKHRFTNKFENIKCLDDAVNLFNQMVRTQPLPSVMDFSKLFKIMINMKHYSVVVSNFGEMQKLGIPIDKVMLSMVTNSYCLMHRVDCGFSMLAIYSKCGIPFDVVTLTILIRGLFAENKVKDAVNLFKKLMRENICEPNEVMYATVMNGLGKRGHIEKTFGLLRLMEQGSTKPTTCIYNVVIDALCKNGNLDVAVDLLSEMKLKGIPPDLFTYNSLIDGFSKFSQWEKVRNLFFEMVNHNIYPDIFTFNTVINGLCIEGRVKDAEKVMRQMIEKGVEPNVVTYNVIMDGYCLRGQMDRCRRIFGSMKDKSIEPDNISYAILISGYCKKKKLDEAMHLFLEISQKGFEPDIFTCNTILKGLFEVGRIGAAQKYFDEMLSARIIPGPITYCILLDGYFKNGLVDEAMLLFYKLERKREDTNVDLYNAVIDGLCKNRKFDKAHDVFKNLSLIGLHPDVITYTIMINGFCLEGLLDEAKGLLRKMEENGCLPNSVTYNVIVQGFLRSNKISEMKAFLKEMNGKSFSFDSTTVTRLVDIIAEDSSLLDLISDFIPENKKLLSILLG

SEQ ID NO: 217 - DNA, 7396 bp, Nicotiana tabacum
tgggtgtggccccatggaggacaagaatgcgggaagtagactagatggttcgggcacattcagaggaggagcactgatgcacctcggtgaggaggtgtgaggcgactgcgctgtagtgggcaacgcgagaggtagaggaagactaagagtattggggagaggttatcagacaggacattgcgcgacttaggattactaaggacatgacttgatagggaagtatggaggtcgagcattaaggagtaatctgtacaaagcaatgaacaaagaattagagggtttgttttgggatagtgaagatactagtattagtaataataaccaagaaagcaaaaaaaatgcaaatatagaaaatgaagtgatcattgaggactcgaatgaagctaattcgaatcgagtgaataaggagatgagtagcgggggtaggggagtagaagaagctgagaatgaggttaatttggatcagatggataaaaggtgtgaaaagaaggtgatatttcaatcagaaaatgcaaatatagaaaatgaagtgattggtgaggagtcgaacaagccacattggaatcgaggacctaaggccataagtaggggggctaggggagtagaagagggtgaaaatgaggttaatttggagcagctagataaaggatcggaaaatgaagtgatcattgaggtctcaaacaaaccaaattcaaatcgagcagctaagtcgacgagtaggggagaaaggggagtagaagaaggtgaaaatgaggttaatttggagcagctagataaagggtcggaaaatgaagcgattggtgaggactcgaacaagccagattcgaatcgagcacctgatgccacgagtaggggagataagggagtagaagaaggtgaaaatgaggttaatttggaacagatggatagagggtctgaaaagagagtgacatttcaatcaggggagatagaggttaggaggaggagattgtgggaatttttagcagaagatgagacagaggatggtcttgatctttcaggttcggagagatttgcattttcggtagatgatgcattaagtgtaaatagtgcaggttcagcggttaataggaggtcgttactgttgtcgaagttgaaacatggtttgtcaattaataagcacaaagagagtaacaggttattcccatggagattcggattgcaagctaaaaagaaggttgaagtaggggagaatagagtggaggaaaggattgatagaagtgaaaggaagcgtaaggtgggtccggttgatcatgagttggttttgagagcaatgtcaagagctctcgaaatcactgagctcgcatacttggatatgacagataaagttcttgatcggtaccctgagcttgcattaatgggttcttgtttgttggttgctttgatgagagatgaagatgtgtatgtaatgaatgtgggagatagtcgtgctattgtggctcagtacgagtctgaggtggttagttctagttcagaatcagtagttccaggcaattgcgagttggccgttgagggcattgctgaagaacctgtagttcccggtgatgaggaaaataaggcgacgaatgagatacctattcaagctatgaagctgactgccttgcaattgtcaactgatcacagcactagcattgaagaagtaaggttcctcggtttccggtgtttccttccatgtttgaagtttaattgatttatgagttatgacattctgctaagtactggagtacataattactttactctgtaagaattacaaagcttcagaatgatgaattcatgtatattagagttgtttcctttatctggtgctccaaaatatgatggcccttgtgctcatcattggcttttctgatctaagacgactttagtaggttatgaaatttattgggatataatttccaaaataaaagcctctgaagcaaagaggcctcaaaggctcaaagtcagtttcttgctttaattatatgcagagctgtatcatatatgtgcctgccaaactggtttttctgtaggtctggtgctttgaatctttggtcacagtgtattgaaccattaaatttgggttggcagcatttagctggtataggcaggttcttagaaacagttcagcatttgcgatagtttgaccctctcaaatggttccttttcctataatctgttattcctttcaagtcataagcttggtcttcctcattgtactcacttttgcataaatgacattagtctgaagaaggatccttaagcccaaatctctttcgttgcctctctctctctctctttcaaatttaattaatgtgagtgttccatattttcatgaacttgtgcttaatctctatgagtggatcaggaatgcagtcagatcctttccgatattgattgccttctaatcttaaaactttcttaaaatagagtgcaatactgttccaaacttgtggttcatgagtcttagggatatcttagaaggtataattttgccgctctttagtgtaatagtgacaatgaggaaacttcataatttgatttcccttagctccatttttgtcaatatatttgccttgtctggactctggtattctcttgttcatctaaaagaaataatgggtttggaagcttcctgtaagcttctaatataactgctcaaatatagctccttatacactaggtgccttctatacttgtagtaaacactgtattagatggagctacttgaggggtgagatatatattgatgaatctttcttttgttttctacttcttccagcttcatttattctgctcttttattcctgcatctctctattttttaagcaaactgttgtttgtaactttgtagttgcctcagaccccacatgtgggaatatactatatatgttgttgtttgtagtaggatactggttgcagttttccttcagctataaaattcatgtattgatgtgatgctatcaacctttttttttttgtattattttgtcttggattattggacgaagacgaatatgataaactgctgaatgcctcaagtgagtgagttctctttttctttcctttttttcttttttccgtttcctgtccaacattatcatttggcagaaacgttgcctattgggattgatggacaactcctaccatgataaaatgattttaactgagcttaagcgtaggaccttttggcaattgaaaagttgccctcgtctgttgtacctaagtctttttctggcagaggagttatatgttaatgtcttgttgagcagtgagtctgccggaagcagcctctctgcctttcaaatgcaggggtaaggtctccgtacactctactctccccaccctccccagaccccacttgtgggaatacactgggtatgttgttgttgttgagcagtgagtgtacaaatagacatttactaactttgatgaatattcttatttttctccattagcgacgatgcaatgcatcagattttgtactccatggaaaacaaaactcaaacaatataatgaggtagataagtaaaaagaaaaagtgaaacaaatgcctgacatatcttctttttcttgtaacatttgtgaaaggcttcaggcctcgtgtgtttgttgggccttatttatcaagacattagatgagcacaaataatatatagtggctccaatttgaggcctgcacattcaagttgatcttttcctcttctatctaaattgccccaatactaattgcagttcactgattttgctggttgttgaatgagctagtagccgtaacagcacctatattgctgtcactcataattctgttcactctttactctgacataaccatttctgcatgccagatacggttaatgattctcgtgttgtctgtttcggttctaccaagttacaacttctcattgttgttagtaaagtgtgtttgaccaatgaatgcaattggctctgagtttctgtcacatttgtcattgtgaattctgtaatttttaattgtttgttgcttgtcacattttcacatttgtattttaatcagtcaggttattaaacagtttgtttcttataacaatttccaggaagttattagaatcaagaatgaacacccagatgactgcaattgcattgttaatgatagagtgaaaggtcgtttaaaggtcactcgcgcttttggggcgggcttcctgaaaaaggtttgtcatttgcttttctttctccattctggtttcccatcccaaaatctcaagcaattgcatcaaattgcacatctgcacattcggagtctcgttttgctttagatattgtggcatggcatcagaggaccctctttgactgtttctatttctggtttggccgaaattttgtggatctctaggagatggaatgtcatgcactcttagtcctagcattccatctagtacagaaatatatgtttcttcctatagttactctggacatgtaaagttcgccacatgtttaattatttaaatgaacatcctacgttgaattgttgctgtagacttatatcctgttgtgacatgcttgttgccaatccgcttaatattttgagatgtgcctgtgcagcctaaattgaatgatgcattgctagaaatgtttcggaacgagtacattggggatgctccttatttatcttgtaaaccttcactgcgccatcatagactctgtcctaaggatcagtttttggtgctatcctctgatggcttgtaccaatatttgagcaatcaagaggtggtttgtcatgtggagaacttcatggagaaattccctgatggggatcctgctcagcatcttattgaggagctcttattccgtgcagccaagaaagctggtatatattctgtctagtctttctgtgcagagttaagggtaaaaagttacggttttggtgattttttacgttttcaagtggccgcacacccttaatttttgctaggaaattacatttagattttcagattttttactctcaatcatctttctctttttctccaatttagaccaattctgtattaggtgggaacactaaattggacccgctatgagtctgagacacattaacatacaattgcttattctggatttatgaccagattatccgccataacttagtttgtttatgtctacttctctttaactgatggaacaaagatacgtcttgaggtacgagaaacgtctttgtcatttactcgtttaagctgctgcactagctctgacatttgataactatgaaaagcctatgtcaagaatattgttttgcactatttagttagatttgtaagcctctgaatagtacattctattctaattgaatcgtactagtcctcagtcctcaccttctgacttgggtctgtggattttggaagtctattcttttggggaagaaacattagtaaaagactacactaaattggtaatataacccaccctttccatgggtgaaaaattcccaagttcatccatcaaccaaattggtaattcctttatgcaggtgtccatgtaaagccttggtaaatgtctccttatgtattgcacctatgtattgctctgacacctagttctttggatcacttggtggattgggtgtattaatgaagtgtagaaattgatagatcagataacattgtcaagatctcgataatcctcttgctaaagagggcaagacattacgtggatgatttatttcatagcatagctgttcagggatttcaagataagttgtcaatcttcgttttctagaagatgcggcatgggattcccaactgatctgtctgaatatctagaagctgatgaatcgtcaagctgttttcttctcttagatgctgaagtttaacatcaatcaactatggctcaatcccaaactaggggattctgggcatccttaaattaaaagaaagtcctttaaacaactccagatgatgtcattggtttcatatcactttctgaaacttaaggactactaaatacgttggcttcatctccacagtaatcattggtttctcatttagtagcatcttttttctcgaccatttcattttatgtatttttgcggtttaggtcaaatatgatttctgagtctgatttcatggtttcttatgattgcctctctaaatgacttgttttgggttgtggcatgcagaagattacatgtttttcaattgaattgttaatgttttcttgcaggaatggattttcatgaattgttggacatcccccagggagatcgtaggaagtaccatgatgatgttactgttatggtggtatctcttgagggaagaatttggaagtcgtctgggaaatacctctgagtttttacaattttcatgtaatagtgcgctgcaattttgatctcttgaaccagacagtcgctcaagctcacttgctccagttatccccttgacaaatgccataactagtgctagaaatatgacaaggctcgtgaatgtagaaattttgtagctgggattgctcagaagtcacaactgctcctagaaaagaaacagggtatcttcatttagtttctttttagattttgcaaatagatattttcattctttaagttctttctttctttctttttgcccccatctcatctactctttagagccaaaatcaagtaattgtgacaggtgggtggcttagtttctgagttctaggcgatttatctgtattttagaggtggatacccaccaatgcggtttacagaggagagaattcttgttgagcccttgtgtaaaagttatcttggtaaagggaaaggtacttcacgtacttttttgctgattgcagtgtcaatatttccttcatttcttgcaacacacacacacacccctattaccatcaaagtcagttttgtacttgtcaaacctgtttgtgtaaaaaagattacaccttttggtacatctgttgatagtagaatatgggcttatcccatgaccagctactgcggggtagtcgagcgtcggtgtatacttgagcagcatttttccttgcatttacgcaaagagattgttttcacgtctccgtgcaggacaacttactcggagcctcctttggagcctcgagcaactgtgaatgtcaaacctaatctccaaatcatcgctgatgatgtcaaatgctctcgaggaccaactgttttacttcagggcccggggtgttgacgttgaaactgccagaaaaagctttgatcttttcgtttgctgctgaagtagtagaccatttcccaaatgcttcaattcggaagaaagttgaaactcatattagagaactgctagatccctcacgcccttaatgctgagacgtcgttgaaatgcgtagaaatggcgtgggatagccactttttaacatggtatttagtttttatccagtatttttaatgctgagg

SEQ ID NO: 218 - DNA, 1902 bp, Nicotiana tabacum
atgaacaaagaattagagggtttgttttgggatagtgaagatactagtattagtaataataaccaagaaagcaaaaaaaatgcaaatatagaaaatgaagtgatcattgaggactcgaatgaagctaattcgaatcgagtgaataaggagatgagtagcgggggtaggggagtagaagaagctgagaatgaggttaatttggatcagatggataaaaggtgtgaaaagaaggtgatatttcaatcagaaaatgcaaatatagaaaatgaagtgattggtgaggagtcgaacaagccacattggaatcgaggacctaaggccataagtaggggggctaggggagtagaagagggtgaaaatgaggttaatttggagcagctagataaaggatcggaaaatgaagtgatcattgaggtctcaaacaaaccaaattcaaatcgagcagctaagtcgacgagtaggggagaaaggggagtagaagaaggtgaaaatgaggttaatttggagcagctagataaagggtcggaaaatgaagcgattggtgaggactcgaacaagccagattcgaatcgagcacctgatgccacgagtaggggagataagggagtagaagaaggtgaaaatgaggttaatttggaacagatggatagagggtctgaaaagagagtgacatttcaatcaggggagatagaggttaggaggaggagattgtgggaatttttagcagaagatgagacagaggatggtcttgatctttcaggttcggagagatttgcattttcggtagatgatgcattaagtgtaaatagtgcaggttcagcggttaataggaggtcgttactgttgtcgaagttgaaacatggtttgtcaattaataagcacaaagagagtaacaggttattcccatggagattcggattgcaagctaaaaagaaggttgaagtaggggagaatagagtggaggaaaggattgatagaagtgaaaggaagcgtaaggtgggtccggttgatcatgagttggttttgagagcaatgtcaagagctctcgaaatcactgagctcgcatacttggatatgacagataaagttcttgatcggtaccctgagcttgcattaatgggttcttgtttgttggttgctttgatgagagatgaagatgtgtatgtaatgaatgtgggagatagtcgtgctattgtggctcagtacgagtctgaggtggttagttctagttcagaatcagtagttccaggcaattgcgagttggccgttgagggcattgctgaagaacctgtagttcccggtgatgaggaaaataaggcgacgaatgagatacctattcaagctatgaagctgactgccttgcaattgtcaactgatcacagcactagcattgaagaagaagttattagaatcaagaatgaacacccagatgactgcaattgcattgttaatgatagagtgaaaggtcgtttaaaggtcactcgcgcttttggggcgggcttcctgaaaaagcctaaattgaatgatgcattgctagaaatgtttcggaacgagtacattggggatgctccttatttatcttgtaaaccttcactgcgccatcatagactctgtcctaaggatcagtttttggtgctatcctctgatggcttgtaccaatatttgagcaatcaagaggtggtttgtcatgtggagaacttcatggagaaattccctgatggggatcctgctcagcatcttattgaggagctcttattccgtgcagccaagaaagctggaatggattttcatgaattgttggacatcccccagggagatcgtaggaagtaccatgatgatgttactgttatggtggtatctcttgagggaagaatttggaagtcgtctgggaaatacctctga

SEQ ID NO: 219 - protein, 633 aa, Nicotiana tabacum
MNKELEGLFWDSEDTSISNNNQESKKNANIENEVIIEDSNEANSNRVNKEMSSGGRGVEEAENEVNLDQMDKRCEKKVIFQSENANIENEVIGEESNKPHWNRGPKAISRGARGVEEGENEVNLEQLDKGSENEVIIEVSNKPNSNRAAKSTSRGERGVEEGENEVNLEQLDKGSENEAIGEDSNKPDSNRAPDATSRGDKGVEEGENEVNLEQMDRGSEKRVTFQSGEIEVRRRRLWEFLAEDETEDGLDLSGSERFAFSVDDALSVNSAGSAVNRRSLLLSKLKHGLSINKHKESNRLFPWRFGLQAKKKVEVGENRVEERIDRSERKRKVGPVDHELVLRAMSRALEITELAYLDMTDKVLDRYPELALMGSCLLVALMRDEDVYVMNVGDSRAIVAQYESEVVSSSSESVVPGNCELAVEGIAEEPVVPGDEENKATNEIPIQAMKLTALQLSTDHSTSIEEEVIRIKNEHPDDCNCIVNDRVKGRLKVTRAFGAGFLKKPKLNDALLEMFRNEYIGDAPYLSCKPSLRHHRLCPKDQFLVLSSDGLYQYLSNQEVVCHVENFMEKFPDGDPAQHLIEELLFRAAKKAGMDFHELLDIPQGDRRKYHDDVTVMVVSLEGRIWKSSGKYL

SEQ ID NO: 220 - DNA, 10262 bp, Nicotiana tabacum
aattttattcaattttctcacgcacacacccacacccacacttccccctacccccaccctttctctctctaaattcactcgctcgcacacacttctatctctttctctctctaaaaattagggttttttctttccacctccattaatggctaacatgccaaaccctacttaatccctcaaaagcatctctccgtacaaattgtacatatcaattcatatattataatgtgtactttatttattatccagagtttgatttgatttattattattttatcttaagcaccgacatagttattgtgaatggagtccaattcttccgctgccgcggacggaggaggaggagcaccgccgtcaaagtcggctccggcgccagcgccgatgccaagtgcgaatgcgcctccgccatttctggtgaagacgtatgacatggtggatgacccgagtacggataagatcgtgtcgtggggcccagctaacaatagcttcgtggtttgggacccaccggagtttgctagggaccttcttcctaagtacttcaagcacaataacttctccagctttgttcgccaattgaatacttatgtaggcatttctttcccttttccttttattgagtttcatgagtcattttttttgatgagtttcagtttgacgcactaactgtgtaaagattatttaacctgttagatcaagctacttacatttcttgtatataggtactaattattgcttattaaatgaaattacctccaattacttttgagtgacctgatggtttaaaaaatctttggaccgtccttgtatatatgcgctgattgtgtaaaactatagagccctttgctctttattgggttccatttaagttctatatattgacggtgtaaaaaggatatgtacattatcaggtcatttaactggtaactatagttaattaattgtatataataacccttggttagtaacctggattaaatggtaaacaacctgctataataggtaaaataagcttatggcggcttaaatcctttttgatatgatgcataggtttagtttttttgtctaaattgagccaaatagatgtggaaaacttgtttatctgatcccaattagtttgtgactgaggcgtacttgttgtagttcatctgagtgatgttgaattgggccttaatatattgttatttccggagatttagattgttttcagcggaaaaggttccaacttcttgtgctatgtggtcttttctttcctgttgtttttggtgattgctaattggaagcattatgttcaatcttgtgattaaaatctaatcaactatcttgttgcattaaagaatgacgttctcgaagacatgtcgttgttttgctatgtataacatgtgcattgtttttgtgactaatttccttaattatccacttgagcacatctttgggtgttgtgccttgcaacatattttttttttaaaactatagctagtgcaatctaacttcgtggattaattgagtttcaatcttttactacaagatcaatataggatttagttcccctaagataataaaggatattacatgaaagttgtgcttattgtagccccgaggtttggtctagtgtaagagcgtaacatgtgatgtgtggattaggcgcaagtcacggggtcgaaccttgctgcagataaaagcctggtatttaagtggagagaggtagagggacgggtcctttatccaccggattgcgaaccttgcgccactggccctagggaatttattgattcttgaaaaaagttgctcttattgtgccatcaagtagataatctatcaggaagcatggatatttctggaccacagtaaaattgattatgggactgtcaatatccgcatcatgttttgacaatgataacttatcttgttattgctgcccttccaaattgaaaaggggtctgatatagtagcttcagtttttgatgctctttgatgtctatatatctttgtccctagtgcacttcaaggcttgatgatctaaattggactaaagtttagtgatgaagtaaggttccttaccctatcttcagttcttttgtttagtgataaagtaaggttcttgaccttgtttccagttctttcttcatagaaaaaggtggttatgttgctttttgtggatttaaatgttgtaaaaggtgattgatagctgtgtagaggggtggggggtgcaagaggggctggaggggaatgagtttgtgtagcagatatatggaggcctttgatctatggtaggaatcctctttgaaggtgccaaagtgagtgaggaatgtttggaggaagcaaattgacaaatttggaaattcatttggaaatgtttctaatatcataggacagaaaagtttaatgtcctaatacttttgggtgccatggcctcaccagactatttggttcatctctaactatcatgtaaagatgagattccgcaatattgttaggtaaatggtcaaggttaagactttttgcagtttgcacttagccttcaaccttcaacaggtgccctttcatccatgtttctcttagtaatcttttgatgctcttgttctcacccttgttgagcatccatatcatagatgcttgtgttttgccttggaggtcaaagaaatataatctccatgttttactagggatgatccttcatcagcggaggaaaggaattcttactggtgaagagtgacactagctattttgtaatttatctgctcattccggttattcacgaaagtggcttagcatattaggcatataataggacttcttgatgtgaatgtgaaatcttaactctctcaatcttctctctgaacttccgcttttcttcttaaattctttttgttgacattttccatttagtcatagaaacctatcatgaagcatccttactgatgctgtcagatgcagatctattggggggaagtattctgagcaaaggaaaataaaattgtgtaaggctaatcttttggcattctccaacttctgtactgattaaaagatacaaagaggaagaaaaagttacagggctcttttatgtaagatatctgtaggagaagtcccttttatatagtgtaattccatttacgagaacccaaaagggaaacacttgattcttaatggaatgaaaaaagaagtctgggaagtagcaagactgcctttcatgccaatatggtataattttggagtttcaaaaataagttgctaataatttgtaatcaaagcaaaataaatgtgtcaaagatggcagactaatagggaatcaacatgaatcaaggaactgacataaatcaggaagtggttgatacttgaatatttgtagattcctcgactgttagtggaatcaatatagaaattgagaagcaagcaagatgtggagtcaaaatagaaattgggaagaagcaagatgaccttttgtcccatagggtacaatgttggctggttaatagtgacttgtttaaaagtatctgtagtttaactaagagttaggattttaggtggttatagggagggaagaaactgtggtattgttggatcatcaccttggacgctaaggtaagaagaacgacaacaataaaaggtataaattttttttctttatatctctgtaatttcggcctcattagtacatcaaaaaaagtgtgaattttaggttgaaaaattactcaaggagacttgtcactctattgctttggtgctaatcatcatgtccagaatagaaaggtcttctctcttgcacgcttgtgtgcaagatgcttatttggatgggctggatgatcttaatttgttgttattccttctgtgcccagaagacactccatttttccctcccccttttaacatatttaattattaatatgtattttgtttaagtttatcttatgcaaaaaaaaaaaaaaaaaattgttttaagtttagatgttttatgaaggaaaagtataaatatatttgttgattgatttttccttagactttggatacttgatcgatccacttacatctatacgtcaatattgatcactactgaataatgataattatatggctcattatcaaggttatttgagattctaacttagttcgggtaaattttttgtacttctagaacttcattgaagataaagcaaagaaagaagctagtgcacttatatttgtaaagaaaatatatttagagaaggattattttgaagaacacaccattttagtgggggatataaaatttattttccaaattttttaccttcttttgctttcctttttccttttctctttcttccttttattcttttcctttagtcatcttttttcgactttttaccatgatctgtttgatgctactttttctcctctttgcttatcgcctttctcccccctctttcctcctcttcttctcccctattcttcgtttccaccttttcttgagtcgagggtatatcagaaacaacctctctacctctccaggtaggggtaaggtctgcgtaatcattaccctccccagaccccacccgtgagattatactggatatgttgttgttatcgtgatctgtttgtttttaccaatagtatctattgttcccctttctttgtattccaaagaatccctcacatcttctatcatgccttttttgtgatcaataaaatcctttgccatgattaaaactttttttttttttaatattctttagaagctctctcatctctctatcacatctctattactttttggtcttacaagacttcttttttgctatctcctattacctttttgtcctctcaaagacaattttccttttattatcacttctttatcacctatttgttacctttttctttcctcaatacttgctcctctgttcaagaaatcttcctttcattatcgcatctctatcacctttttgttacctttttcccaaatactaatttttcctcttctcaagaattatttatgtcacatatctatcacatttatatcaaaaaagaatagaataaggaaatagcttcatattaagacttgattattggttattccttaacatatgttcttcaatcaattaagaacaaccattgaagaagaagagcttctaccacaactctcaatcattccaaatagtggaaaaatgagcctaagaagacgaaaatgtgattaaaaggtgataagatattaaggttaaatgttatctgagtgataagttcgtttggcgtgactatgagagttggggtagttttcgttattgagaagctcttcctcttggttgttcttagctaattgatagaagagtataagattatttaaagctatttcatttcctcttgtgatataaaagtgatagagatgtaatggtgaaatgaagtgttcttgagaacaaaaagagtcttggaggagacagagttaacaaaaaggtgataaagatgtgatgatgaatagaagaattattgagaagaggaaaatgaagttttaggaggacaaaaatgtgattggagatgggaggcgttcttgagaagagtgaaaaagaagtcttgaaaagacaataaggtggcagggacgtgatgggatgagtttttgagaagagcaaaagaagttttggaaggacaaaaaggtgatagctatgtgattgaaagatatgagagcttcttgggaagacaaataaaaagggaaaatactagagttattagtcgaaataggaatcaacagtgaatggacgaaaaatgtgacaagaggaagagaaggaaatgaagaaagaaatgggaatgaaaaagaaagaagatgaaaaataaatttatatttgccactaaagtgatgtgtctcgaaataatcccttctaaatatattttcttaacaaatacatatgcattagtttcttctatattttattttcgatacaattttaaaaggaagtactaaagaaatgtagccaagctaagtaagaaatatttttcgacaaatattatttttgattttgcttcacaaaaagatctaatcttatctaacttagggaagatattctctcactttttcgcataagataaagttaaataaaatacaacaacaataaaaacaacaaacctagtgtggtctcataaaagaaataaaataaaagttaaaaatcagataacttgaaaaaacatagggaaataattcagtgtacatgccattcttgttatgcaaacatttctttcaacattagatctgtttagccttgcttgatcttagctgagaaagatgcttgccttttgaagtgctactgagagagacatctgttgtatttcattatggtttctgtttacttgtggaagttcgtgaaattggttgccttaaaatcagattagcttgatgcatttcaatgacggatccaagtaacgttgattgcgtagaatgggaacatggaatttgcaatgcatctattatttgtagtcttgaatccatatatttcaaacaaaagaacattagcttgttttcgaattaaggttttatatttcctgacagtccccatttatgggagtacattgggtttgttgttgtttttgttgttgttatttcctggcactagggctgtcaaatttagtccacgcccaaatgacttgcccaacccctccaaaggttgggctagttattgacacgcccatttattaaactcagcccatcttgactcaacccatttaaagttgggctgatttttagcccaaattgatccatgagtaattttgtcgaaataccttagaaatattttttttttttgatatgttatatatggccgtaataaaaaaaaagagtcttattgagtaattatacaattcataaaaaaataatacatattaattaaagcttggtaagagttgggcgggtaaaaatgacccgcccatttattgacacaacccattttgacccgcccaaaatcggcccaactcgcccgtttgacacttctactcgacaccattaggggtgggcctatcagttatctgtttacaaatatcataacccgataaccaaaccgataagatattggttatcggttaatcagttatcgatcattatcggttcggttatcggtttacccgataagataaaacaaccaaaacagtttcgcaatgtataaaacagtttcggtataaaactgttttgctaaaacaattttataagatttgcaatgtatacaacattttcggtaaaatcagcgttcttaagatcttctttgttcaaacgactagcagtaactctttgtacattgatatctgcttttttactctagtacaaaattatgtatctagattaaaatttttattagttatgagatacaaattttataacaactgacataagataactttgtaacagctcaacaattaaagcacacaacaaatctcacttcaactttcaaacaaactaagtaaaatccagaatgctttcaaacaaattaagaaaaagatgaagacgaagccactaaaaacttacacgaagaatcaagatgaagctgaagaatgcgactgagaaatgcgaccgaagaatttgatggatctgagaaatgaagtgaagatgcgactgaagagtgaaagaaagaagcagagaaatgtgactgatgtctgcccgagtcttgacgagctgactggtgagggcgtgaggcagagaaactgaaaaagatagggaaatcaaagagtgaactatgaatcatgaaaccctagtatgtatatacttaagggtaaattagtaaattagttaatccttattgggttatcggttttacccaataacagaattgccaaaccgagcccgaactgataacccaataaaataaaatttaacccgttaccgaaccattaatcctataacccaataaataattaacggtccgggttatcggttttacctgatatatgcccactcctagacaccataacctattcactgttttttaattgtagtgctatagcgaactggcaaattggtgaatacatacaatcgtatatagctagattatcatgtatgctctacaccttaggaaggccatcctcatctgttcaagtattttacttttgcaacgttcagttctgttatttgtgtgtcaaaatatgtgcacatagtaatgtgaagacggagagcttgtgcatatttatctttgtgatattagtgaatgatgttaggccactcaaaaacggagtcatattatcctccaatgtagagtttagaattcttacaaccactgtgtcatatttatgacactgatcttgaagcttgctgaaggagtagacaaattcctctccaaaatacagagcatagccatgttagaaaatagagagcgcaacctttttacggggctaactccactgtctagtactaaatgtggttgcagggatggtttcccttgagctgtcataggttgagtttgatttactattgagatcccttccatcgagtgtgggtggagatttgaattgtttattgatatttttctgcttgcgaaggaaacctgacgagtgatcttgatgacaaacaaatctatttggtaaacttcttggttgattaattacctttaattcgaaaaactggtgcaatgatctttgtgctacttatcaaactcctactcatgcttttgtatttttctcttttgggggtttttgatgacaaacagggttttagaaaggttgatccagatcgctgggaatttgctaatgagggattcttaagaggtcagaaacacctgcttagaagtataagtcggcgtaaacccgctcatggacatgctcaacaacaacagcagcagccacatggacagagtgcatctgttggggcgtgtgttgaggttgggaaatttggacttgaagaagaggttgagaggctgaaaagggacaagaacgtgcttatgcaagagctggttaagctcagacaacagcagcaaactactgacaatcagttgcaagggatggtgcagcgccttcagggtatggaacaacgacaacaacagatgatgtcattcctggcaaaagctgttaacagccctggattcttggcacagtttgtacagcagcaaaatgagagtaataggcgcatagctgaaggcagcaagaaacggaggattaagcaggattttgaaccacaggatcattcagttacccctgtggatggacagattgtgaagtaccaacctgtgatgaatgagtcagctaaggcaatgcttagggagctttcaaaactagattcttctcctagactagagaacttcaacagcagtcctgaaagtttcctgattggtgatggttcaccacaatctaatgcgtcttccactcgtgtttcagaagtcactcttcaggaagtcccaccaacttctggccagcccttgctgagtacagcttcagcaattaccggtcaaagttcatcttctgaaattaccaataaccagttttcagacataagctcatttgtagaagctcaggatttgcctcctgtttcgctttctgcgacagatatgattatgcctgagctatcacagttacaagaaatcttgcctggaaacaatatggatattatcgaatctgagatggagaatgattctttcatggattcttcagtcggagcgaacgggaaaatgccattagaaatcggtagtttctctcctgatcctcaaattgaatggcagactggtttgctggatgatatacaagagcttcctggtgtcggtgaccccttctgggaaaagtttcttcaaagcccttcccccggagagacagaggagatggaccctgttgcaatggatgatatttccaatgaaaccaagccacaagaaaatggatgggacaaaactcagcacatggaccagcttactgaacaaatggggctactaacatcaaacaatcaaaaactatgatctggttatcaaagaaaatgtacattgagttatgttagaaaattcaggtagtgtctgtatcgtaagtcacttggcctttacctataagagagctgctaatacgcacttttggtccctgggctctttgcacataggggaccttgttagcttctagtttaccctgtttttgatcatcttgatttctctcttcttcttgacataaagctgaatggatctaagtttacattaaatcgacgtttcttttgtcccttcccctttctttttacattcatgcacacaaatatgtaaaaatatgtatcggttgttccagttgttgctgtgatataagctttatgctcccatcagaatgtaacgattcaatagactttttgctgcctttgt

SEQ ID NO: 221 - DNA, 1515 bp, Nicotiana tabacum
atggagtccaattcttccgctgccgcggacggaggaggaggagcaccgccgtcaaagtcggctccggcgccagcgccgatgccaagtgcgaatgcgcctccgccatttctggtgaagacgtatgacatggtggatgacccgagtacggataagatcgtgtcgtggggcccagctaacaatagcttcgtggtttgggacccaccggagtttgctagggaccttcttcctaagtacttcaagcacaataacttctccagctttgttcgccaattgaatacttatggttttagaaaggttgatccagatcgctgggaatttgctaatgagggattcttaagaggtcagaaacacctgcttagaagtataagtcggcgtaaacccgctcatggacatgctcaacaacaacagcagcagccacatggacagagtgcatctgttggggcgtgtgttgaggttgggaaatttggacttgaagaagaggttgagaggctgaaaagggacaagaacgtgcttatgcaagagctggttaagctcagacaacagcagcaaactactgacaatcagttgcaagggatggtgcagcgccttcagggtatggaacaacgacaacaacagatgatgtcattcctggcaaaagctgttaacagccctggattcttggcacagtttgtacagcagcaaaatgagagtaataggcgcatagctgaaggcagcaagaaacggaggattaagcaggattttgaaccacaggatcattcagttacccctgtggatggacagattgtgaagtaccaacctgtgatgaatgagtcagctaaggcaatgcttagggagctttcaaaactagattcttctcctagactagagaacttcaacagcagtcctgaaagtttcctgattggtgatggttcaccacaatctaatgcgtcttccactcgtgtttcagaagtcactcttcaggaagtcccaccaacttctggccagcccttgctgagtacagcttcagcaattaccggtcaaagttcatcttctgaaattaccaataaccagttttcagacataagctcatttgtagaagctcaggatttgcctcctgtttcgctttctgcgacagatatgattatgcctgagctatcacagttacaagaaatcttgcctggaaacaatatggatattatcgaatctgagatggagaatgattctttcatggattcttcagtcggagcgaacgggaaaatgccattagaaatcggtagtttctctcctgatcctcaaattgaatggcagactggtttgctggatgatatacaagagcttcctggtgtcggtgaccccttctgggaaaagtttcttcaaagcccttcccccggagagacagaggagatggaccctgttgcaatggatgatatttccaatgaaaccaagccacaagaaaatggatgggacaaaactcagcacatggaccagcttactgaacaaatggggctactaacatcaaacaatcaaaaactatga

SEQ ID NO: 222 - protein, 504 aa, Nicotiana tabacum
MESNSSAAADGGGGAPPSKSAPAPAPMPSANAPPPFLVKTYDMVDDPSTDKIVSWGPANNSFVVWDPPEFARDLLPKYFKHNNFSSFVRQLNTYGFRKVDPDRWEFANEGFLRGQKHLLRSISRRKPAHGHAQQQQQQPHGQSASVGACVEVGKFGLEEEVERLKRDKNVLMQELVKLRQQQQTTDNQLQGMVQRLQGMEQRQQQMMSFLAKAVNSPGFLAQFVQQQNESNRRIAEGSKKRRIKQDFEPQDHSVTPVDGQIVKYQPVMNESAKAMLRELSKLDSSPRLENFNSSPESFLIGDGSPQSNASSTRVSEVTLQEVPPTSGQPLLSTASAITGQSSSSEITNNQFSDISSFVEAQDLPPVSLSATDMIMPELSQLQEILPGNNMDIIESEMENDSFMDSSVGANGKMPLEIGSFSPDPQIEWQTGLLDDIQELPGVGDPFWEKFLQSPSPGETEEMDPVAMDDISNETKPQENGWDKTQHMDQLTEQMGLLTSNNQKL

SEQ ID NO: 223 - DNA, 4264 bp, Nicotiana tabacum
ataggaaagctaatgcacaagaggatggggctttgaaagccggtgaggaggattccaaggtgcaaaagcaagatgttaatttgaatatggacacatcaaagttgggcaggagcggcggtgtttaaattccgccattcaaattggctagaatgatgaaggaggttcaggacaagagcagtgtcgagtaccagaggatgacttgggatgctctaaggaagagcattaacgggctagtgaataaagttaatgcagcaaacctcaaaaacattatcccggagttatttgccgaaaacttgattcgagggaggggtctcttttgtagatcctgtatgaagtcccaaatggcttctccaggttttactgatgtctttgcggcattggttgccgtggttaacaccaagttcccagaagtgggtgatcttttgttaagaaggatcatactgcagctgcaaagggcttataaacgtaatgataaggttctatctcttgctctttatgcttgcaggtctttttgatttatgcaatataatgtatatttgtacattattgttgtttggacgacagagaacagacggtttatttggatgtcacagagactttcaaatcctcctttgagaatatcactcactaaagagaaactggggggggggggggggggggggggagtgttactgagccatttagtttagttattaaattcatgtttcataatgcgaatcttctcataatttgtcttacccttaatttttactcttgcagcctcagttgttagcagctgtcaaatttattgctcatcttgtaaaccagcaaatcgttcatgagcttattgctcttgaactgcttacagttttattggagaaacctactgatgatagtgttgaggttgcagttggttttgttacagaatgtggttcaatgcttcaggacctctgtccacgaggattgcatggtgagtataccttgaaagtttgttctgtaattcacgatttctattttagtttattcatgtaaagttttgctgtgtttgtcatgctaatacatttttttgcatttaaataggaatctttgagcggttccgtggtattcttcatgaaggtgaaatagataaacgagttcagttcttaattgaaagcctctttgcattgcgaaaagcaaagtttcaggtgagtttggttttttattgttttctgagtaagaagaaatatttgattccttatttatcaaagcaagaagaaatattagatcatttacatgcatcctcctcagggttacccagctgtgcgtccagaacttgaccttgttgagcaggaagatcaattaacacatgaagtctctctctcagatacaatagatccagaaattactttaggtatgttttataattggtttttcatagaggtattataatggacgtttcttgagcaattatatggaattttgattttgatgttggtctatatgctcagatattttcaagccggatcctaatttcttagaaaacgaaaggaagtatgaagaattaaagaaggcaatacttggtgaagaatctgaggaagaaggagagtctgatgcagaatcagaggatgaagatgaagatgatgagtctgacgaagaggatgaggagcaaatgaaaataaaggacgagacagagacaaacttaatcaacctcaggagaacgatctacctgacgattatgtctagtgttgacttcgaagaagcagggcataagctgttgaaaatcaaactagagcctggtcaggaggttggtatcttaatctctcttcttcttttttggcgttattctactcctgttgagccatgtcctatgcataactgtatgcatgctcacatggattaatctgtacatagattttcatgtgctttgatggtcgaaagataataatgtcgcttttgatttggttgtcattatatggaaaagatttaagttaaaacaaaaatgtagttggacttgagaaaaggtctagcaaaaatttaaatttttggatacaaaataaagagttccagaatttaagctcttgttgaatttgatttttcctcgtatttatcatggatagcgtagagacatttccattctatcattctcgggaaaaggacattgccagtgaaccgtgcataccataaaccatttttctgtggttccattaagatgatggtcgaggaatagatgtggcaatgaaggtggggggattatgtaattggcttgtcttgtggtccatgtaggtggagattcatgtagcccatgatgcaacttctaacattgataatttgaggaattaattagctcatgcttcatgtgtaatagtcatcaggaggacacaagtcacctgctgcttcactgcaaggcagcttttgacttatggattcttttatattctcctttggaatccatcaggttattccagctaatattagtttttcaataagttaaatagttatttaataatgggactgaggcgtagtagtagtagtagttgtaatgggaaaaactcccgtatacaagcagtatactgtccagctaatcttagttctcatgtggaacatccagcaacgtagaaaaaagggagaaactgtggaaatttgcacctttgtgtgttgtcgtggactattctattcataagatgagtacaacttttcaccaatgtttttatccaaggggagtattcccagtatattgatatcttaggactgtatcaggatgattatttaagttttgttatattaattttgacttgtttactgcttgttgtcaataagtaacatattttggtagcctggtaccttgacttgttttctcttggagccaggttaaaatggaaaatgattttggtgttgtaatcatttttgtcctgacagaatattgtctattcttgtgttaatgagtgaccctttgctggttttaccaaaaagaaaagaaaaccgatttaaatttgtttgatccatgcagatggagttgtgcatcatgttattggagtgctgcagtcaggagaggacttatcttcgttactatggtctactggggcagcgtttttgtatgatcaacagaattcatcaggagaactttgaaaaatgttttgtgcagcagtactccatgatccaccggcttgaaactaataaactgcgtaacgtggccaagttttttgctcatttgcttggcactgatgctctgccttggcatgttttggcttatatacggctgacagaggaggacacaacatcttcttctcgtatatttatcaagatcctattccaggtaaataatttggtctctaatttctacagcttgcttcattttttttctttcaaataagttatagccagtttgatatttgtggcctaatttctttagaccctctctattatattacaaaaattgctgtttccgagtatttactttctgtttgtccacctgtttgaagtcttttatcactaaatatatcaccacatgtcaaaagttgcattttgaccacacccatcatcttttctcctgctcttttctgggattcttgttttcatttctttttttaggcggcgggggtgcttgagggggcagcagtaataggacattattctgttagcttcaaattcaatctagatgtgtcatttatgcaggagttgtcagagcacctaggcatccgcttgttgaacgagcgtcttaacgaccccaacatgcaggactccttcgactctattttcccgaaggataatcccaagaatacaaggtttgctatcaactttttcacttccattggtctgggtggaattacggaaaatctgcgagagtatctcaagaacatgccaaggcttatcatgcaacaacagaagcctgtttctgaatcggatgagtctgggagttcatctgattctgaatcttcaggatccgagtcagaatcatcatcatccagttctgaggaaagtgatagtgaaagtgatgataaacggaagaagcggaagaggagacggtagggaccttagactgctcagcaatctgaaaactaatatgtattaccattgtgaactagttatagcaagtgttatgttcctcagactagatttttatttgctttgtatgtttaattcactaaaatctgtgcagtttcagtcttgactttgttccagttttgactagttgaaccttagaaattcatttcttctttttcgtgccaatccggtagtttgtttattgaaaccttagagaacttgtttgtttatcaatgtaatggaaaccatttaactgatgatgctt

SEQ ID NO: 224 - DNA, 1680 bp, Nicotiana tabacum
atgatgaaggaggttcaggacaagagcagtgtcgagtaccagaggatgacttgggatgctctaaggaagagcattaacgggctagtgaataaagttaatgcagcaaacctcaaaaacattatcccggagttatttgccgaaaacttgattcgagggaggggtctcttttgtagatcctgtatgaagtcccaaatggcttctccaggttttactgatgtctttgcggcattggttgccgtggttaacaccaagttcccagaagtgggtgatcttttgttaagaaggatcatactgcagctgcaaagggcttataaacgtaatgataagcctcagttgttagcagctgtcaaatttattgctcatcttgtaaaccagcaaatcgttcatgagcttattgctcttgaactgcttacagttttattggagaaacctactgatgatagtgttgaggttgcagttggttttgttacagaatgtggttcaatgcttcaggacctctgtccacgaggattgcatggaatctttgagcggttccgtggtattcttcatgaaggtgaaatagataaacgagttcagttcttaattgaaagcctctttgcattgcgaaaagcaaagtttcagggttacccagctgtgcgtccagaacttgaccttgttgagcaggaagatcaattaacacatgaagtctctctctcagatacaatagatccagaaattactttagatattttcaagccggatcctaatttcttagaaaacgaaaggaagtatgaagaattaaagaaggcaatacttggtgaagaatctgaggaagaaggagagtctgatgcagaatcagaggatgaagatgaagatgatgagtctgacgaagaggatgaggagcaaatgaaaataaaggacgagacagagacaaacttaatcaacctcaggagaacgatctacctgacgattatgtctagtgttgacttcgaagaagcagggcataagctgttgaaaatcaaactagagcctggtcaggagatggagttgtgcatcatgttattggagtgctgcagtcaggagaggacttatcttcgttactatggtctactggggcagcgtttttgtatgatcaacagaattcatcaggagaactttgaaaaatgttttgtgcagcagtactccatgatccaccggcttgaaactaataaactgcgtaacgtggccaagttttttgctcatttgcttggcactgatgctctgccttggcatgttttggcttatatacggctgacagaggaggacacaacatcttcttctcgtatatttatcaagatcctattccaggagttgtcagagcacctaggcatccgcttgttgaacgagcgtcttaacgaccccaacatgcaggactccttcgactctattttcccgaaggataatcccaagaatacaaggtttgctatcaactttttcacttccattggtctgggtggaattacggaaaatctgcgagagtatctcaagaacatgccaaggcttatcatgcaacaacagaagcctgtttctgaatcggatgagtctgggagttcatctgattctgaatcttcaggatccgagtcagaatcatcatcatccagttctgaggaaagtgatagtgaaagtgatgataaacggaagaagcggaagaggagacggtag

SEQ ID NO: 225 - protein, 559 aa, Nicotiana tabacum
MMKEVQDKSSVEYQRMTWDALRKSINGLVNKVNAANLKNIIPELFAENLIRGRGLFCRSCMKSQMASPGFTDVFAALVAVVNTKFPEVGDLLLRRIILQLQRAYKRNDKPQLLAAVKFIAHLVNQQIVHELIALELLTVLLEKPTDDSVEVAVGFVTECGSMLQDLCPRGLHGIFERFRGILHEGEIDKRVQFLIESLFALRKAKFQGYPAVRPELDLVEQEDQLTHEVSLSDTIDPEITLDIFKPDPNFLENERKYEELKKAILGEESEEEGESDAESEDEDEDDESDEEDEEQMKIKDETETNLINLRRTIYLTIMSSVDFEEAGHKLLKIKLEPGQEMELCIMLLECCSQERTYLRYYGLLGQRFCMINRIHQENFEKCFVQQYSMIHRLETNKLRNVAKFFAHLLGTDALPWHVLAYIRLTEEDTTSSSRIFIKILFQELSEHLGIRLLNERLNDPNMQDSFDSIFPKDNPKNTRFAINFFTSIGLGGITENLREYLKNMPRLIMQQQKPVSESDESGSSSDSESSGSESESSSSSSEESDSESDDKRKKRKRRR

SEQ ID NO: 226 - DNA, 4287 bp, Nicotiana tabacum
tttctagtttttttcccccctgtgtaattttgatcaaaatttgattttgtttctctttttgtatataattatagattttgatacttgggttgggggggatttttcgaaaaatttgaagaaaaagaagaaaaaaaaatgagttttcaagatttggaatcgggtcggtctttgggttccagaagattccagacaaatgggaagcaagacccgacccaagcagtggcttctggaatattccagattaatactgctgtgtctacgtttcagaggctagtgaatacacttggtacccctaaagatacccctgagctaagggagaagttgtaagtggctcttaacatttcattcattttttattaaatcaggttgaattaaagaatttctaataatttttatttgtatttgcctattattagcatgagatggtttaaatgaatttgagactgagtcattatggtagttattgttgttgccagtggcggaagaagcattttatccaagggattcaacaaataaaaaaagtaaacgcacgaagaagataaggggattcaacatctaatattacatggaaaaaaaattaatgttatatacaatgtgtaattttctgctaagggggttcgactgaattccttccgcgcacctagctcagcccctggttgttgctataggctgagttacataactagtgtatgtgagagttttgcaaagcatagttggtataaaactcagttaaaggaggagggttgttgtaggttgacgtcaaactgaaaatcatctagttataatgaattgaattctatgaatattggtgctcgaattgatatttagattcaaatagtcggttctaactagtttgggattgagggtagtggaccgcattactgtgttttccaattttagtgcttagtggcagtgacgaatgtttcaatggagctcaaagatctcatactttttagcttgtagtttaaaaaaaaaatagtagttatcaattggatcaaacatttggttggcggtacttgtgctgattttgctctactgcaggcacaagacaagggtacatattgggcagttagtcaaagatacatctgctaaacttaagcaagcaagtgaaacagatcatcatgctgatgtcagtgtaagttttttaagagatcgttatttctgctcaccgtcttttgtcggtattgatgggtctgcactttcacattatgcatatttaagcacgtattgatcagcttatttctctatgagattcttttatattgagctctcattcttgtttttggctagtcttctgtgtatttcttgctcttatttccaacttcgcttacacttaaaatttaacttcatatactatttgtgctcaggctagcaagaaaataacagatgcaaaactcgctaaagattttcaagctgtcttgaaagagtttcaaaaggctcaaagacttgcagcagagagggagacggcatatacacctttcattcctcaagcagttcttccttctaggtaatgtcggtggcaatggttgtttttacgggaattatcatcagtaaacagagttaccggcatatgcagagctacataaaaaggaaacttatagtgctatgagtttactctacaggcgaatatttatagacttactgaatcataccctttctttatatttgttgcctctcatttttacccttaatttatattaccgtgtggtatacagttacacagccagtgaggtagatgttgctgccgataagagtccagaacagcgagctctccttgtggaatcgagaaggtgagttagtcttgtcctattatttttttttgctgtttgttacttcctccgccgcaatttatgtaatactctttcctttttagtccgtccctaaaagaatgaacctttatatatttaggaataattaactttaaatgttcatttaaccttaatgggataattcatagccacacaaatatctataacttattttagaccactagtttcaaagtctatgtttctttctttctttattaaactctggctctggtcaaacaccatcacataaattgggatggagagcgtacttgtttttgtgtttgtctctagattgttaaactcattattatcaaactccagatatgcatttagttatagaaatatcgatggtcgaattggttgctaaaactaaccagcaagatagctatcagttgttggcatacaaggaaatgaagctgacctttgggtttggacccaaggtaactgttcggttagtgcaaattagatagagcattgttttatgtcgtataagaaaaatcagatgacacctgaagcttggggcttagggtgttgggaacaagagttgccaaggggtgcaaaaatgttaaatttacttggtgttacttgttagtgatgtcttttaatgaataagtagtaataccaaactccaacattagttgattaaaaaaaagtactaatacctaagtctactagatttttatgtcttgatttgttggaaatatttgggcttgttactgaccgtgagttagtgagcaaaagaagctcctatactaatgtgaaaagaggaggtagatgtagctatttcgacattctatccatgtgaaatctgggagggtaaatcagaggccgataaattgttgaattcatttgcttctgtgaaacacaacttgaaaacttccatttgttggccatgtcctgaaaatgcattgacatcttcttatggaactatacttgtgatgcgaatatgatctaagatcaatgattttgcgtccttaagacatgtatcttcacttctcatttggtgaaacttagcttttgttttgtgttccacgtgcccctttgctgcaggcaggaggttttgcatttggacaatgagattgccttcaatgaagctattattgaggaaagagatcagggaatacaagaaatacaacaacagattggtgaagtgaatgagattttcaaggatcttgccgtgcttgttcacgagcaaggaactatgattggtaaatcacttccctttcattttaacaatcaaaatctctaggtgacatttacttgatgtatataagtctctttctctcagatgacattggctccaacattgagaattctcatgctgctactgcacaggggagatctcaacttgctaaagctgcaaagactcaaagatcaaattcatctctggtaattccattacttaagcatcctttccccgaacatagatctggatcagtgtgcttatgcaagctatgttttatcaaaccttcatattagttttactgtgcttatattccataagaagtctcgtggttagtctctaggattggagaatttagttgtggacaaatcggaagctgttctatcattaaggtactgcatcttgccaggctatgaacaaaatggtatttagatgctctagttacagcactgtttaatagaagtggaaaagtaaagagtagctacattatattcaggtgactgctgtatacatctacgcatagttgtgtccaaatttgctgtgccatttgaggcagttgtcgttagaagctttaaatctttatgaagagtcataatgacaagtcaagtcatgcaattagtttcttaggtttcatgtagcggactatatgaggggaggaaggttttggaaggagtatggtaaggttggatttttcatcctgtgtaagtgggggcaatatggtttgaacgaatgttgagttcttttagatggttcgaatctttcaatcaagccactctaattttacttcctcattacctcctatccatgtaggtggaaaatacaagtgtactaatttccatttcctgtcactttacagacaatgtataaatctttccatcttatattcctggcagtgaaaatataatgaaaatgacttcttgactgattatcttctgcagacctgcttgctcctggtgatatttggaatcattctcctaattgtgatcatagtacttgcagcatgatcagaagatactcagatggaggaaaggatcctaaactcttcagcagtggaattgatctttgtgattctagatgttttgagggcaccaaagaatgctcgtaccgatgcatgaatctttttttgatgctagaaaagttgtggaactgtgaattgaagtttcatatggttggggagggggggggggggggggggctgtcagtgtttgttttaatattgtaaatttggtgtttggagttgcaaagcgtgttgctaccatgttatggcttgtttgtcaataaaatttgattcttatt

SEQ ID NO: 227 - DNA, 822 bp, Nicotiana tabacum
atgagttttcaagatttggaatcgggtcggtctttgggttccagaagattccagacaaatgggaagcaagacccgacccaagcagtggcttctggaatattccagattaatactgctgtgtctacgtttcagaggctagtgaatacacttggtacccctaaagatacccctgagctaagggagaagttgcacaagacaagggtacatattgggcagttagtcaaagatacatctgctaaacttaagcaagcaagtgaaacagatcatcatgctgatgtcagtgctagcaagaaaataacagatgcaaaactcgctaaagattttcaagctgtcttgaaagagtttcaaaaggctcaaagacttgcagcagagagggagacggcatatacacctttcattcctcaagcagttcttccttctagttacacagccagtgaggtagatgttgctgccgataagagtccagaacagcgagctctccttgtggaatcgagaaggcaggaggttttgcatttggacaatgagattgccttcaatgaagctattattgaggaaagagatcagggaatacaagaaatacaacaacagattggtgaagtgaatgagattttcaaggatcttgccgtgcttgttcacgagcaaggaactatgattgatgacattggctccaacattgagaattctcatgctgctactgcacaggggagatctcaacttgctaaagctgcaaagactcaaagatcaaattcatctctgacctgcttgctcctggtgatatttggaatcattctcctaattgtgatcatagtacttgcagcatga

SEQ ID NO: 228 - protein, 273 aa, Nicotiana tabacum
MSFQDLESGRSLGSRRFQTNGKQDPTQAVASGIFQINTAVSTFQRLVNTLGTPKDTPELREKLHKTRVHIGQLVKDTSAKLKQASETDHHADVSASKKITDAKLAKDFQAVLKEFQKAQRLAAERETAYTPFIPQAVLPSSYTASEVDVAADKSPEQRALLVESRRQEVLHLDNEIAFNEAIIEERDQGIQEIQQQIGEVNEIFKDLAVLVHEQGTMIDDIGSNIENSHAATAQGRSQLAKAAKTQRSNSSLTCLLLVIFGIILLIVIIVLAA

SEQ ID NO: 229 - DNA, 2586 bp, Nicotiana tabacum
aagctacttaggtcaattccttatctacatttgctaacatgttataataaagtattttcaggttattaatctgtcattaccaaaaagatataaagcattttggtcccagacattaggatgaggctttcattttacaccattcaatcttagataataaaaaccagaagtatatagcagtaacctttcactccattttgtgacactatctagagagaaaaatggctttgagaatgtgggcttcttcaacagccaatgcattgagagtttccactgcctcaagagctaatctttcccctgcttattcactctctagatgcttttcgactggtaacttttttcaatccattgaactccttttttcattctgaataggtaaatatatttaaattcttaatttgagtttcttgaaaaaaatattttccttgaggcgagggtctatcgagaacaacctctctatttgtaaatggtgggggtaaggtctgctgtaccctccccacacctcacttaggaattacaatggaatgttattgttgctgtttagtttcttgaaaatcttggtttttgcagttcttgatgggttgaagtatgcatcttcacatgaatgggtgaagcatgagggctcagtggcaacagttggaatcactgatcatgctcaggttcttcttgtttttagtacttccatatagttctcctttttttttttttttttttttttttgcaatcgagaaatccccgagggtcaggtggcgcacaattttaaagtcagtagataatgggctcgtccctctacccttcaccgcttaaataacacgttctttgtcggcagcagatttgcatatagctctccattgaatgctgcttatatactaatatggtatcaacagatgccatgtaactaggaggtcacgggttcaagccgtaaaaatagcttgttgcagaaataaagggtaaagttgcgtacaatagacccttgttgtccggtcctgccccgaaccccgtgcatagcgggagcttagtacatcaggctgctctaccagtatcaacagatgacattttctttcaaatatctattttttttttgtgggggtgggggacaagagaacattttctggccaaacctttagtgaaagaagttaaggatgcctattctctaggggatttcagttctaattgaataaatccatagaaaatgaactttatggcaaaatgctaagaaaagctaagatttagtcatgtttgtccaagaattcatactgaaaagcatgaggagctgatatgttgctcagattcttcaaaaataccacaaaatgcatgtcggatcctccaaaagtaatgcatttttggaggatctgacgaaggtgcaataacattttatgagagtccgagcacatacggagctcataaaccatgataaaaaagaaaataggaaaccatgaatatgaaaagagttcaacttttatgcgcggacaatgtaaaagaactttttcactatcatatcacctataacacgactacaagtaaccatccttaaaaaatgggattaataatctgaaaaaaagggtagagttaatggaaactacaggttaaaatacattgattgatagtgtaaaaaatctttttactttcggtgtatataagttaaataatagatgatgtcattaacggaatgcaaaaaatgtgaaattgtactgcatttcaacagaggttagtcttgaattattacagcacaagcaaatccatttacattgtttgaaatgtcttgcatttatagttcttaatctggagataggagttgaccttcaaacatgaatgtttttcaggatcatcttggagaagtagtgtttgtggatctaccagaaactggtgctgctgtttcacaaggaagcagttttggtgctgttgaaagtgtgaaagctaccagtgacattaactgtccaatctcgggcgagatcgttgaggtcaacacaaagctcactgaaacacctggtttggtaaatattactccaactatttcttgttgtctttccttcatcctctgtgtgacttatggttcactggttcgagccgtagaagcagccattaatgcttgcattagggtatactatctatgtcacacccctttgggcgcggctcttccctgacttgcatgaatgcggaatgttttatgcatcgagctggccttttttcccttcatttctcttcttttcattctccttatgacttatttgatgttttcttgatcaccttttgcattcaaggttaactcgagcccatatgaagacgggtggatgattaaggtgaagccgagcaatccatccgagctagaatctttgatggggtccaaagagtacacaaaattctgtgaagaagaggatagtcattaaaacttgaaggtgttttttttattcaacttgaactaactttgccttgttaaggctgatactgtgatgaaacttccagtcacttgttaaaattctacaaaaatcaaaataacatccactttcctggtgttttctttgccttatgcagagttgtgatgtagtttttggttgttaagatcatcttgctctctgattttttaccttc

SEQ ID NO: 230 - DNA, 495 bp, Nicotiana tabacum
atggctttgagaatgtgggcttcttcaacagccaatgcattgagagtttccactgcctcaagagctaatctttcccctgcttattcactctctagatgcttttcgactgttcttgatgggttgaagtatgcatcttcacatgaatgggtgaagcatgagggctcagtggcaacagttggaatcactgatcatgctcaggatcatcttggagaagtagtgtttgtggatctaccagaaactggtgctgctgtttcacaaggaagcagttttggtgctgttgaaagtgtgaaagctaccagtgacattaactgtccaatctcgggcgagatcgttgaggtcaacacaaagctcactgaaacacctggtttggttaactcgagcccatatgaagacgggtggatgattaaggtgaagccgagcaatccatccgagctagaatctttgatggggtccaaagagtacacaaaattctgtgaagaagaggatagtcattaa

SEQ ID NO: 231 - protein, 164 aa, Nicotiana tabacum
MALRMWASSTANALRVSTASRANLSPAYSLSRCFSTVLDGLKYASSHEWVKHEGSVATVGITDHAQDHLGEVVFVDLPETGAAVSQGSSFGAVESVKATSDINCPISGEIVEVNTKLTETPGLVNSSPYEDGWMIKVKPSNPSELESLMGSKEYTKFCEEEDSH

SEQ ID NO: 232 - DNA, 1318 bp, Nicotiana tabacum
tatgaacatctttaacttgcgcccttttcaccaactaacaaatgaacatgatgtcgatgagacataattactcggtaatattttttaaaattttaaataaagttaaaaatgttatttcttaaagtatgttactaacttttatatttatagatattgttggttaggttgtgacctatgaagatgttaagacctacaatcaggaagacgaccaaagtttccttattaatgttgtactcgaagatgatcagtaagtacttttaaaatagaaaaatactttattgatagattttatatatatatgtgtttattaatcttaccatgaaacgtataggaggaacaggattatggcaacattatggagcgaacttgtggatcaaattcaacatcacttgaatgaatctgccgatgagcctttgattgttattttccagcatatgaaacctcaaaaatatcgaggtttaccataaattacatgtatttttttattttactgtaaaaataattttaaatttcaaatttttattcatatttcatttgacacatagataattactcagtgcgtagctgttgggatcagacaaagatatggataaattctacgttgccgcagtctattgaatttaaatccaggtttgtgaagtgtataatccttttctatatgtacagaaaatataaaaatattatttataaattacaatttttgacttatgcagattacttgcagcacgtcaatcaaacattgagcgaatcactcgaacaagttctcaacaaagttactctgttagagatgcgttagacaaaggaattgtattgtttaaaactattagagatttagttcagtgcacgcaagtgagtttaatttactttctcaattatatttaccttatgttatctgttttgcatttacaataattgtttatttttttactcaataggaatccaactattggattgcggcaaaattggttaatttggaacttgaccggggatggtcatacttggcatgcaacaagtgtagtcgaaaggtggaaaaagttgaaaataaatacttttgtgccaaatgcaatgaagaagagtcttctgttactcacaggttagtactatttagtaaaaattttaaaatcttatatctataaaaaatatgcataaggttaataaaaattgagttgcaggtataggcttcaagttcgtgttatggatggaaccgcttttatctcattgttgctttggaatcgcgaagctatgcaacttatagggaagtccgcaaaagaactcaaggaaagattagttgagatatactactaaatttaatttgatt

SEQ ID NO: 233 - DNA, 753 bp, Nicotiana tabacum
atgaacatgatgtcgatgagacataattactcggttgtgacctatgaagatgttaagacctacaatcaggaagacgaccaaagtttccttattaatgttgtactcgaagatgatcagaggaacaggattatggcaacattatggagcgaacttgtggatcaaattcaacatcacttgaatgaatctgccgatgagcctttgattgttattttccagcatatgaaacctcaaaaatatcgagataattactcagtgcgtagctgttgggatcagacaaagatatggataaattctacgttgccgcagtctattgaatttaaatccagattacttgcagcacgtcaatcaaacattgagcgaatcactcgaacaagttctcaacaaagttactctgttagagatgcgttagacaaaggaattgtattgtttaaaactattagagatttagttcagtgcacgcaagaatccaactattggattgcggcaaaattggttaatttggaacttgaccggggatggtcatacttggcatgcaacaagtgtagtcgaaaggtggaaaaagttgaaaataaatacttttgtgccaaatgcaatgaagaagagtcttctgttactcacaggtataggcttcaagttcgtgttatggatggaaccgcttttatctcattgttgctttggaatcgcgaagctatgcaacttatagggaagtccgcaaaagaactcaaggaaagattagttgagatatactactaa

SEQ ID NO: 234 - protein, 250 aa, Nicotiana tabacum
MNMMSMRHNYSVVTYEDVKTYNQEDDQSFLINVVLEDDQRNRIMATLWSELVDQIQHHLNESADEPLIVIFQHMKPQKYRDNYSVRSCWDQTKIWINSTLPQSIEFKSRLLAARQSNIERITRTSSQQSYSVRDALDKGIVLFKTIRDLVQCTQESNYWIAAKLVNLELDRGWSYLACNKCSRKVEKVENKYFCAKCNEEESSVTHRYRLQVRVMDGTAFISLLLWNREAMQLIGKSAKELKERLVEIYY

SEQ ID NO: 235 - DNA, 6265 bp, Nicotiana tabacum
tcatgttaaaaaaatttggtcttgtgcctatttttttttcttcctaatattaaaaattctttaatctccaccttccacttatcatctctcgaacttctatatatagtttcactcagttgcatttattctcaactctcttttctctcttgggttcttctcttcatctccaccattgataatactcattaataccaaatcttttaagcaaatcttagagtcaatatcaatggcatgcttggaactctcaaaagaggttagtacttacaatctaggcatctatctctattttctttctccgaataaagggcagctcgatacataaggtatcacacattcatgtttggtctggaaagggctgcactctaaggagtgtaatatagacagcctacactaatacaagcattagtgaccgtttccacagctcgaaccccggacctatgaaggagacaacttagtcgttgttccatggctcccgttcattcttttaataattttcaccaagattgttagttgtatatatcacccaaaaaaaaaaaaaaagatttgttcttattcctagtgcgtaccatttaccaatccttgattcttgatgagaagaattttacactatcagtatattatgttttaatatgatataggcacatgtaatatgcttgtttttttcaaattattaatatcacttttaggtgacctgataatataaatttttttttgaaaaaaaaaactaaaacttgttaagctatctatatatatatttatttaatttattgttttggaactttattgttatgatcatcaggtgaagttgaaaggggaagaaatggattgcactaaggatggaactattgatcttaatggaaagccagcaatcagagaaacaagtgggaaatgggtggctggaattatgattctacgtaagcttttattcctgaaattaatcatattagaaaattcttaatatttatcgttgaaaaaagaaaacgacataaagtactattagtaatatctgcatctgcttaatttcttttattagttcaatcatggtatatactgttagagctactcaagttatattattctacgttcagcatgtacagttatgagagtattgagtgttagaattatatcaattaagtatataaattatatctatttatataattcaaatcaattcttatcactggaaattacttttccgattgtgttagactcaacactcgtaacatttctaaaatatagtcttaccggttcattatgagttcggaggtttatgtgtttggaagttaacaggtttaaaaattataaagtttacgggttcgaaattccgcagttttgaaagtttatgaaatttgtgggtccggaaggttgttggtttgaaagtttatggcttcatgtttattatatctaaattatttattaatactcttgagaagttatttttcttaatttgcgtaccaaacatcggaaaatgaataagattactacttattttccaagaaatcattttccgttataccaaacacaccctttatgtgttattatttgattgcgcataaaattttaaaaataaaatttttaaatttgttgtttataaatcaagttataaatgtttttattggcgataaaaaactaaaaaggaaagtttaaaattaaatttattttaaatataaaaaattatcattcctttttagactgattaaaaaagaaaaatatagatacataagttacgactaatattcacttctataattttaaccgacgtagagctttttctgtgagtgagaaaaaacaaagaaaaagaaaggttgataaggtgaggtaataaatgaagccagctatcatatatgttggaaggggaaaatgacaaatgattgaaatggccaaagcctaacattttgcagtaaaactaatcaagacgtgtgtcaaaaaactagtctcttattgctaggcactatttgacagctttcaaatacatagatacctaggtttttggcatatttaagcgacggtacgaagctaggatttgaaatttatgagttctaaattaattacttaatatgtagcttgttttagataaagcatctcgtattcatgcagggtttcagaaatgaccgtacccaaataatataatatagacaatctaatataatgcaagtattaatggatgctttcacgatttgaactcttacctaatagatcacacgaaaataattttactgttatctccgaggctcccattcagagggagccggagtaggagggacatttggttccttcctcggatagggtcttgtctgcaatagccaaaatcctgtggaagacagaggaaggataaggaagtgacaagaaaaccatgcagttctgggaaaagacatactacctgacataaaccaacgatacgatgtggtgggactgccacgtcatccttgacaaaattttggttcttgaatggtgggggaggggctaattatggtgatctggactttcacttatccccaactttttgccttgtgatgtgacccaaaaaaaaaaaaaaaattgataatgatagtgtccaagttaggtttgctccctttgactatttcattccgatataaaatttgagattatatttgtaacaccccaaattatagatagggtactacatcggtaaaattataagagagatgctggatatataagtcaacaagtcttagactttagtgacgcgttttaaacccgtgaaggcctaaattcagaacggacaatatcactagcagattgggttgttacggatggtatcagagtcacttttgtatcaatcttgctgatggtagatcagagttcaactgagtttaggcaaatcccggttaggcggggaaaacttcagtgttgaatctaggcaaatctcatgcaatggaaaaaatctcaacgaggatgttgaatccataagagggagtctatgttaatattacaataattttatatcaaattcttatattatctactatctcatattgaaaatggaattataaccttgttttacatcaaacgaccccctggtattatttttcaccagtataggtatgttaaataacataattcattaattttataaaaataacaaaataaatattatttcttatttttattgaaatttgaacatcaatcctctctaaacttcactccaatttcattttatattttggtgcatttgtcttactttgtctcttaatagcagtttaatactttcacttctttgttttcttctttaattgacatttggtttccatattgaatatgtagtgaatcaagctttagcaactctagcattttttggagttggagtgaatttggtgttgttcttgacaagagtgttaaaagaaaacaatgctgatgctgctaatagtgtgagcaaatggactggcacagtctacatctgttcccttgttggtgcttttcttagtgactcttactggggaagattcaaaacttgtgccatttttcaagtcatctatgtaactgtaagtatccattactcccatcatatcttgcacaagcgctattcgtgctaattgttagtattgattgtaaaacgggccgatggagcctatgtttatccggttcaactgaactgagtattttcgacacagaatatatattgaacctataatttcaaaagtacatagagttcactgccaagaaacttaaaggttgaacatattccaaaacttgtgctcaattttcaagtcatcaatgtcataagtatccattacttccatcatacttctgtagatattgagaaactactaatgggtctttggtacgtggactaaattattccgggcttataataccaggattataactcctggaggataaaataatctcaagtttgattgggataaggtgggatatcctgtattaagtcagagagtaaatttataccatgtttggttgatggtacaaatttatcccaccttattccgcgtaccaaacaacccctaagagtacactagcttataagttcacaatcaagaagatctaatgttgctaccattatcttgcacaagcgcgattcctgctaattgttagtgctgattgtaatcaaaggcagatggagcatatgtttaactggttcatctaaacttagtattttcaacacaaaatatatactgaaaccataatttcaaaagtacatagacttcagtattaagaacctaggttgaacctatcaagcttaaatcttgaattcgcgtctgactgtaatagtccttgatcttgctcttactaagtttggaacatcattgacagggattggcattactagcactagcatcacaactttacttgctcaaacctaaaggttgtggggatcgaacaactctatgtggagaacattcaaccatgggggttggtctattctacatatctgtgtacatgattgcactaggatatggaggttatcagccaaatattgctacctttggggctgatcagtttgacgagcatcatccgagggagtctcaatctaaagttgccttcttcagctacttctacctgttcatgaaccttgggtcgctcttctccaacactattttagactactttgaggatgaaggaatgtgggctcttggcttttgggcatctgcagcatctgcttttgcagcattattgctctttcttggaggcactgctaggtacagacacttcaagtctagtggcaaccctcttgccaggtttgctcaagttttagttgcagcaacaaagaagaatagagtggagacaccagaaaatgaagatgacttctaccaaggggaagacgacgacgtaactggtggtagaaaaatgctacacacccatggtttcaagtaagtagaaatacacacttagcagttcaatccactatgtctacaagaatctcaaatttatgacccgactgtcattcatttatcattactagtctatttgccattctataatgcactaaactagatttttcatgttgcagattcttggacagagcagctgtggtgacatcaagggaacttgacgaccagaagctgagcgatcacaacccgtggcgcctctgtcctatttcacaagttgaagaagttaaatgcattttgagactgctgcccatttggctatgtaccattatttactctgtagttttcacgcaaatggcctcactctttgtcgagcaaggcgatgccatgaaaactacaatagcaaacttcaggattccagcagcaagtatgtctacctttgacatccttagtgtagcaggcgtcatatttctaaaccgcagagttcttaatccactggtcagtaggtttaagaagtgcaagggtgataataccgggctaactgaacttcaaaggatgggtattggactagtcatagcagtaatggctatgctatcagcaggaattgtggagtgctacaggctaaagtatgcgagcaatgactgcaaacactgtgaaggctcaagctctcttaacatcttctggcaagtccctcaatatgcttttataggagcttcggaagtattcatgtatgtaggtcaattagaattcttcaatgcgcaagcacccgatggacttaaaagctttggaagtgcactatgcatgacatcaatatcattgggaaactacgtgagtagcttcctcgtgagcatagtgatgaaaatatcagcaacagacaacatgccgggatggataccaggaaaccttaacaaaggtcacttagacagattctattttctattagctggtttgacattaatagatttggttgcttatattgcatgtgctaagtggtacaagaatattaagcatagcgaaaagattcaggaacacgaggaagatgacaaggtgtgaagtccagcatacctgatatggatcataccttagggattttctgacaaagccatatgaataagaggaagatatgcagtcaccataagattttgtttagagtttccgcttttggtatttggatttcctccatctccaatgttccaactcaatcggctcaaaatccccagctctacagaagtgtccagagagttgggctgctcttaatttcttggtccttcctttctcattgttgctgctgcatttgttggttctgtcatattagttcttgatttaacgaacattttggattgatatgtaaatggattggcttttcctgtatccaagaaactgttgaacaatactgatttacccttaaaaaattcccatgtccaaaagacctcattaatttcatatgcaattcagag

SEQ ID NO: 236 - DNA, 1788 bp, Nicotiana tabacum
atggcatgcttggaactctcaaaagaggtgaagttgaaaggggaagaaatggattgcactaaggatggaactattgatcttaatggaaagccagcaatcagagaaacaagtgggaaatgggtggctggaattatgattctactgaatcaagctttagcaactctagcattttttggagttggagtgaatttggtgttgttcttgacaagagtgttaaaagaaaacaatgctgatgctgctaatagtgtgagcaaatggactggcacagtctacatctgttcccttgttggtgcttttcttagtgactcttactggggaagattcaaaacttgtgccatttttcaagtcatctatgtaactggattggcattactagcactagcatcacaactttacttgctcaaacctaaaggttgtggggatcgaacaactctatgtggagaacattcaaccatgggggttggtctattctacatatctgtgtacatgattgcactaggatatggaggttatcagccaaatattgctacctttggggctgatcagtttgacgagcatcatccgagggagtctcaatctaaagttgccttcttcagctacttctacctgttcatgaaccttgggtcgctcttctccaacactattttagactactttgaggatgaaggaatgtgggctcttggcttttgggcatctgcagcatctgcttttgcagcattattgctctttcttggaggcactgctaggtacagacacttcaagtctagtggcaaccctcttgccaggtttgctcaagttttagttgcagcaacaaagaagaatagagtggagacaccagaaaatgaagatgacttctaccaaggggaagacgacgacgtaactggtggtagaaaaatgctacacacccatggtttcaaattcttggacagagcagctgtggtgacatcaagggaacttgacgaccagaagctgagcgatcacaacccgtggcgcctctgtcctatttcacaagttgaagaagttaaatgcattttgagactgctgcccatttggctatgtaccattatttactctgtagttttcacgcaaatggcctcactctttgtcgagcaaggcgatgccatgaaaactacaatagcaaacttcaggattccagcagcaagtatgtctacctttgacatccttagtgtagcaggcgtcatatttctaaaccgcagagttcttaatccactggtcagtaggtttaagaagtgcaagggtgataataccgggctaactgaacttcaaaggatgggtattggactagtcatagcagtaatggctatgctatcagcaggaattgtggagtgctacaggctaaagtatgcgagcaatgactgcaaacactgtgaaggctcaagctctcttaacatcttctggcaagtccctcaatatgcttttataggagcttcggaagtattcatgtatgtaggtcaattagaattcttcaatgcgcaagcacccgatggacttaaaagctttggaagtgcactatgcatgacatcaatatcattgggaaactacgtgagtagcttcctcgtgagcatagtgatgaaaatatcagcaacagacaacatgccgggatggataccaggaaaccttaacaaaggtcacttagacagattctattttctattagctggtttgacattaatagatttggttgcttatattgcatgtgctaagtggtacaagaatattaagcatagcgaaaagattcaggaacacgaggaagatgacaaggtgtga

SEQ ID NO: 237 - protein, 595 aa, Nicotiana tabacum
MACLELSKEVKLKGEEMDCTKDGTIDLNGKPAIRETSGKWVAGIMILLNQALATLAFFGVGVNLVLFLTRVLKENNADAANSVSKWTGTVYICSLVGAFLSDSYWGRFKTCAIFQVIYVTGLALLALASQLYLLKPKGCGDRTTLCGEHSTMGVGLFYISVYMIALGYGGYQPNIATFGADQFDEHHPRESQSKVAFFSYFYLFMNLGSLFSNTILDYFEDEGMWALGFWASAASAFAALLLFLGGTARYRHFKSSGNPLARFAQVLVAATKKNRVETPENEDDFYQGEDDDVTGGRKMLHTHGFKFLDRAAVVTSRELDDQKLSDHNPWRLCPISQVEEVKCILRLLPIWLCTIIYSVVFTQMASLFVEQGDAMKTTIANFRIPAASMSTFDILSVAGVIFLNRRVLNPLVSRFKKCKGDNTGLTELQRMGIGLVIAVMAMLSAGIVECYRLKYASNDCKHCEGSSSLNIFWQVPQYAFIGASEVFMYVGQLEFFNAQAPDGLKSFGSALCMTSISLGNYVSSFLVSIVMKISATDNMPGWIPGNLNKGHLDRFYFLLAGLTLIDLVAYIACAKWYKNIKHSEKIQEHEEDDKV

SEQ ID NO: 238 - DNA, 3540 bp, Nicotiana tabacum
taaacgtcagcccaatatattattggtccaattacagatacaaccaagtgaaaaaaaaaaaaaacaagtttcgatttgatgaagacgacgatcttcatgctctgaaatcgaagcttttcatcatcaagaacgaagcttttcaggtgatctacttcttttctctatcattttttctgtggtctcaaaaattctaatgaattttgataatttatgtttagttttttcagttctcgcactcaatacgggtgacatatgacattttttgtaagaattcatatagcgaattctaactaagtttggattgagattttgttgattcatccattgattttttcttattcatcaaaaatatttcttgtttttttttttaaaatctttgtatccctgtaggatcataacttgtgaatcttcttatatgagctcttttgaaacgaattatttttggaatctaatgtaaattatagaattaatacaccatatttgcttctttttagttaatttagccttttatggtggaaagttgttatttttaggattcaattcatgtgttaaggtttttgttatatgaacattgttggaagtctacgaatatccttaaagtgggggaagaacaaaatttgtctctctctcttttttttatgtgtgtgagggggggggggggtgagggtaaggaaacttttgggagtttttaatttctaggcgcttttgttttttcttttagtttctgaataatacttcttagaaggttttactaagaggtgaaatattccaacgttggttgtcgaaaaatagatataaccagctgtttctagtaagatggccatagtttataattcttatgcaacaccacgagaacttgtgattttgtctcgttttaatgttcctgttttacaaaagaaatggcaccatataggtagctcaaccgaagattggtaaatgttatgctgacatggatggtaaagtggaagtcttatcgggataggctttgtgtactcatctgaaggatgtcttatactctttgagcggacgagactatgttggccatttaagaattggtgtttatcgtctgatacttagtgttgttaaaccatcaatatgtattgatcagtgtggagaggcgcctcgactgtggtaggcatgttccaaagattagattcacttcacctcagctttaactggtctaagttgttgctttccaaatggtcaagtttttcacccttaaagtttagtttgctacccctttcagctgagtaatttcacttaataattagggagtttaagattcaggaacttgtgagttacttggaaattacagtgtaggtgccgtttggctggagcagtaatttggttcttaggaaagtacttttcttttttctccaacttgactaacttaagcttttctattaagttctcattgatgataggactgctaagggtcagttttactacatttgagatatagattgaacttgaatgggcaaactcgtgttaattttgtaatattgtatctttacttaacaaacgagttttttttggtgaaattagggcctaatatctggtcagtgttgctcccctttaatatgacattatcttgtgattcatcacctgaaatttttgaagtcaattataaagttttttcattcaggaatctctaccaacatctaacattttgtgggctccttccctgatttatactgggttgtggttgtggttgtggttgtggttgttgttgttgttgttgttgttgttgttgttgttgttgttgttgttgttgttgttgttccctgatttttccttctaatatgaggctattaacatctaacattttccagaattatgagatcgcagccttacaattagggcaccatttcttttaatgcagggagataaatactgaagtaactgaaccttgttccttattgtgctgattttttgtaccctgcatctcgaaaaaattgtttcgtgtatgcaattactatatctaatacatgtcccactcttaaatatgtgacgatcttattttagacgaaggtttcactctgtatttatagttggaatctggaatgttatggtctaccagatcgatttgtcctgtgtggtatgctgaatctagtcaatattcgatcgctcaattagaatctttaaagacaccggtacttattttgttttactaatcattttcattggcaaaaacataatgttatggtatcagctgatttgtttgtttacctttatctttctgggcgctgttagttgtagtttaaaaccatcattagacatctttaccaggtgaaattttgtcattctgagatcaggatagtgctaataaacaggagtgcattgagcgaatgcatgttttgcttgtctaagacatactacggttgacgaatgattgggtagatattgaatgtgatgcgttcattcacaaggcatttcactaagttatcggtcacatgttttgaagacatgggataagctcaacacatgttgaagtgaaactttatgcttttctaaaatgactcaattacagtgatacttcaagttacagttactattttattaaaactatgtcagagagagaatgtcttatgtgtcggcttataatatagagcactttttggtcatctatatgacattgttccagactgtgttccacccagtcgttttttggttttctctcttacttttagtcccttgaaccttttaataggctaatccaccagatattttgtttgaaccctcttctttttagttgtataagtttttaactaaaagcattcttcttttacaggcagcacaagtagaagagcctcaatggaattagcggacagagctgttgggctgcttttgacattgacgagtttgtccattttcacatattataccttttgggttatcattctggtaaagctgatatactcttccttccagatatgttcagtttttttagacccatgttttattaagtgaggaaactgatatatgctttttattcctgtttcagcctttagttgatagggatcatttcgtgcacaagtattttctaccacaagaatacgcgattctcattcctgtatatgctggagtagcactcatctgcttattgagcgtgtttattggatatgttatgctcaaatccaagaagaagaaggcatgatatgaccatgtcaaatccatttttgctctctactaatttcatgataaccaataatctcttctatttttaactcttctcaactttgaacagccttcacatagatgtgtctctctattcttgtattaactatgatttggaacctctagctatgatttttagttatacagacactaaacaagacatggtcgattattctcttgttgtttgctgctggagtgtgagaaaactttctggtggatgactaatgtgttggattatcaacagttaccacaagaaagttgccacttatagtttgtgaaatttggtcagcagtttattatcagcaatttgattcttaaattaacccaaacatttgaatccattagactcaactccacaagtac

SEQ ID NO: 239 - DNA, 243 bp, Nicotiana tabacum
atggaattagcggacagagctgttgggctgcttttgacattgacgagtttgtccattttcacatattataccttttgggttatcattctgcctttagttgatagggatcatttcgtgcacaagtattttctaccacaagaatacgcgattctcattcctgtatatgctggagtagcactcatctgcttattgagcgtgtttattggatatgttatgctcaaatccaagaagaagaaggcatga

SEQ ID NO: 240 - protein, 80 aa, Nicotiana tabacum
MELADRAVGLLLTLTSLSIFTYYTFWVIILPLVDRDHFVHKYFLPQEYAILIPVYAGVALICLLSVFIGYVMLKSKKKKA

SEQ ID NO: 241 - DNA, 7125 bp, Nicotiana tabacum
acttgcaacctctttactttattggttttgagaatactcatttcttcccttttaccaccgttttcttctagtctttaattcaagcaattacctttgagtcactaatgatggcatgcttggaactctccaaagaggttagtacccaccatcttttttgtcgacatatattcataaagattgttagttatatacgataagtttgagtcttatatcttattcgcgagaatttgttttctccgatattgtttattcattaaatggctacacacacctatttcacacatagagaaaaaaaaaagatcattagttctttcgatttctcagtgcctaccacttaccaatctttggttcttttcttgaagacagaaataaggttaaatgaagtgcatattcatttctttatgcaaatgtttcctcatgcaaggaactgtatatacatataaatttaacttatgtatactgacattataaataatatttacattattatgttttactatattatagtaggtaacttactttatttttcaggttactagctaattatgtcactttttataaatagttactcgtatttattttttaggtgactttacggtacaaaaattcttctacagtcaataagtagaacttaaacataataaatataaataaatgatctaacacttcaatggagtttactaaatttactatattatttatcttttgtcttttaggtgaaaatgatgaaaggggaagaaatagaatgcaccaaggatggaactgttgatcttgatggaaaaccagcaatcagagaagcaagtggaaaatgggtggctggaattatgattctccgtaagctttttttcctttttttcttcctaaaattaatcatattgtaaaagtcgtaaatttatctcccgaaaaagaaacgataaaacttgtgatatctgcatctgcttatctctcttttgagctatatccagattaagagtattattattattattattatttatgataagctacagtttttatacatggtatatactgttagaatctacatcaattaagtgcatgtatcataatctgcctatatatagtttgaataacttcaccacgagtgaagtacacgaacaaccattcttagggttattatttaaggattatttaatacttattttatcctgagaatttaaaataaaaatcttaattttggaataattcagaacatttgtctcttaaaaattttgaactgaaaaactgaaattcagaatatattggttaattcctaaatagcaaccctttagagtaacaacctgttgttatttctaccttcaccacgtagatattggactatccaatattgagatattcgtgttatattattctaggttcaagatattcagtcatgggaataaagtgtaagaatcttgtggtacaaactacatcgtttcaaattattctaattaattcgtatgacctatgataacttttcaggtcatattcctaaatcctaacaagtaatattcacttccaatatgattttacggacctagaggctaaggctagagcttctttttctttttctttttctttttctttgtaatggaaaaacaataaaaagaaaggttgataatggtggaataaggtgaggtaataaacgaagccacatatcatgtgttgggaagctagaaaatgacaagagagtgaaaaggccaaagcctaacacttttcagaataacaaagccgtgtgtcaaaaaaattcgagagctattgctgggcctatttgatagctttcacatatacacgtacataggtctttatcgtatgaagaacctagtgggatgtgtaagattctttcatttataattaaaggctacgaatttgagtattgaaaaaaaaaaaaaaaaaaagacgtatgaattagcaaaatttataggtaacaaatatcatatgattgtaccaaaaaattccaaaaaagtacataggtatttggctcctccgtattggggtagggttttgtctataatagcaaaattcctgtggaagaggaggagggataaagaagtgacgagaaaagcatgcactattgggaaagacatctttggcaattggcacatacctaggaaatgaagtggtggggctactacgtcatccttgacaaaactctgctacttggtgggtgggtgggacaattctgtgatctggactttcacttatccctaactttttgccttcttatatatttatacaatgtattggggtgtatatacgacttgtttagatcataagatgataaaaagtaagaaaacgatttttacagtgtcaataatttggacaggtgaataggataaattatgatgatccatacttaaatagtggagacttacgaaaaagtattgcatatatatttattgaccatgatagtatccgagttaggtactttcggtaattccatagtttgcttgcacgacttagtcatattctcgtgtgctgccttggacttatttgtctaaatatactatcttgctattacttgttatcggtattccttccatattctttgttgctatatccgatttagctttctaactatttgtcttgttatcggggcttccttcaccttttttagccgagggtcattcggaaacagtctccctatccttccagggtaggggtaaggttgcgtacattctaccctccccagacctcatttggtgggattatactgggtagttgttgttgatagtatccgcgttaggttgcccgtatcatctattttattgggtaaatgtcttacccgtgagtacaaaattacaaatatgggtgctaatgggtgtgtggtagcgatggggtgtttactttcaaagaaaagtgcaagagtttcgaatatagcatagagaatttgcttcaacatcgagacattgtccttttgcatttaattaggaattcttgggttcattcaagaaataatgaagtgtcaaatctaacaggtaacctatcagtccaactttagacattgattgcttgctaaaagttcatttgacaagccaaccttctagcacatgataataaccaagaaagcaagtcctatcatggggtgattgatatgatataatggctactagcctactatttaggtgtggtcagtttcataatgtcttaattcagaatttatattccaactcaatccagaaatggacattatgataaagaacaagaaaaaaacagcagaaattgttgtgaaaataataaatggtgtctccacaaatcgatatttcaggcaaccaataaagttgaactacgtacgtacgtacgtacttttaaaaaggataaagcgacaatcaatttttcaaattgcattaggcttctactaatgagtaatgacaatcatttccttaagtgcacacttatcgcatatattaaccactaatccaaaccagaaaattcaattatcaatgtcactaatacttcttctacttattcttttgtttaattgatataaaattttggtttccatattgattatatagtgaatcaagctttagcaactctagcattctttggagttggagtgaatttggtgttgttcttgacaagagtgctgaaagaaaacaatgctgatgctgctaatagtgtgagcaaatggactggcacagtttatatatgctcccttgttggtgcttttcttagtgactcttactggggaagattcaaaacatgtgccatttttcaagtcatctatgtaactgtaagtatccattacctcctatcatacttcggtacatattgaaaaaccaattaagaatacactagcagaataattcacaatcaagaagatttaatattggctgctaccatcatcctgcacaagcgcgattcctgctaattgttattgttgattgtaatcacaggctgatggagcctatgtttacttggttcaactgaactcagtatttccagaattgtgtgtatgtctatacatatattgagaaatactaaaatttcaacaaatattaaattttgaaccccatgatttcaaaaatacacagggtccagtgctaagaaccttaaaggttgaacctatcgagtttaaattcagaattcacctctgattgtaataagttatctatcttgctcttactaagtctggaactttgttgacagggattggcattactagcactagcatcacaactctacttgctcaaacctaaaggttgcgggaatcgaacgactctatgtggagaacattcaaccatgggcattggtctgttctacatcgctgtgtacatgattgcactaggatatggaggttatcagccaaacattgctacctttggggctgatcagtttgacgagcagcatccaggggagtctcactctaaagttgccttcttcagctacttctacctattcatgaacctcgggtcgcttttctccaacactattttagactactttgaggatgaaggaatgtgggctcttggtttttgggcatctgcagcatctgcttttgcagcattattgctctttcttggaggcactgctaggtacagacacttcaagtctagtggcaaccctcttgccaggtttgctcaagttttagttgcagcaacaaagaagagtagagtcgagacaccagaaaccgaagatgacttctaccaaggggaagacgatgacaacacaactggtggtagaaaaatgctacacacccatggtttcaagtaagtagaatgtagaaatacacttagcagttcaatccgctatgtctacaagaatctcaaatttatgacctgactttgtcattcaattatcattgatgactagtctatttaccattctataatgcactaaactagagttttcatgttgcagattcttggacagagcagcagtggtgacatcaagggaactcgacaaccagaagcagagggatcacaacccgtggcatctctgccctatctcacaagttgaggaggttaaatgcattttgagactgctgcccatttggctatgtaccattatttactctgtagttttcacgcaaatggcctcgctctttgttgagcaaggtgatgccatgaaaactacaatagcaaacttcaggattccagcagcaagcatgtctacctttgacatccttagtgtagcaggcgtcatatttctaaaccgcagagttcttaatccactagtcagtaggtttaagaagtgcaagggtgatcatattgggctaactgaacttcaaaggatgggtattggactagtcatagcagtgatggctatgctttctgcaggaattgtggagtgctacaggctaaagtatgcgagcaatgactgcaaaaactgtggaggctcgagctctcttaacatcttctggcaagtccctcaatatgcttttataggagcttcggaagtattcatgtatgtaggccaattggaatttttcaatgcacaagcacccgatggacttaaaagcttcggaagtgcactatgcatgacatcgatatcgttggggaactacgtgagtagcttacttgtaagcgtagtgatgaaaatatcggcaacagacaaaatgcctggatggataccaggaaaccttaacaaaggtcatttagacagattctattttctattagctggcttaacattaatagatttggttgcctatattgcatgtgctaagtggtacaagaatattaagcatagcgaaaagattcaggaatatgaggaagatgacaaggtgtgaagtctaacgtacctgacatggatcatatcttagggatgttttgccaaagccatatgaataaaaggaagatatgcagtcaccataacattttgtttagagtttctgcttcgtatttggatttcctccctctccaaagctccaaactcagtcaatccaaaatactcagctctgcagaattcttcagggagctgaacccctctaaatgtctaagtcatcatttctccttgttgctgcatttgttcgctctgttatattagttctacaattgacaagcattttggattgatatgtaaatggattggcttttcctgtatccaagaaactgttgaacaatattgatgtaccctcaaagatttgcgtctgaaaagtctcattatttaacatgaaattcagagctagaaaagccagtctccacctcaataaaaaaaacttgcatggtatgttagggtaagatggccacaaatactatatctgtaaatcctattgccaacaaagtgcataaagaaattgtgtaaggttagatggctgtacatatagaaatctcaagagctctttttttcagcggaagccatttcatcacaaaataagttccacatagaacatgaaattatttactagttgcaaaatatgactatcctaagaggattcaggtcatcaaagagaatgcatgttctgagaaaatgaaacacatgattagaaactacaccaaaaaggcctttatattgttttgctttatctatgatgttgatgtattcttttccaagatctagtaaaccaagaaaactgataaggaactgagatgatgatgactaaaaatggtgaaaactgaacgataatgcaacacaaagatatctaactgcaacctttcatccacatgcaagttagaaagataatacaccagcagaattacaagcaattttggaaagtagagaatgtgaattattttgccactgatttgtcaaatgaagcatttagggttcatgattcccaagatctctataactgcataagaaaatatctcgcagctgagaaggaagtcaaacaagacttgaaccatggaaactgtttctacattgtagaagacactctttgatgcaccaacctaaatgatataacaattctaagaacaagcctctatgatcggaaactttctactcttaaggaacttctatatttcatcacagaaggaatacgtggagctaaaaagcaatggaaaaactgacaaacatagattgctcaacatgatttctatataaacaaacagttacagcataaattaacattggaccttacaaactgcgtatggtgtggaatttctatgccaggttggttgtcctccactttggacaagagtaaaacactgcccatccttcaccgtgcttttactctacaaa

SEQ ID NO: 242 - DNA, 1797 bp, Nicotiana tabacum
atgatggcatgcttggaactctccaaagaggtgaaaatgatgaaaggggaagaaatagaatgcaccaaggatggaactgttgatcttgatggaaaaccagcaatcagagaagcaagtggaaaatgggtggctggaattatgattctcctgaatcaagctttagcaactctagcattctttggagttggagtgaatttggtgttgttcttgacaagagtgctgaaagaaaacaatgctgatgctgctaatagtgtgagcaaatggactggcacagtttatatatgctcccttgttggtgcttttcttagtgactcttactggggaagattcaaaacatgtgccatttttcaagtcatctatgtaactggattggcattactagcactagcatcacaactctacttgctcaaacctaaaggttgcgggaatcgaacgactctatgtggagaacattcaaccatgggcattggtctgttctacatcgctgtgtacatgattgcactaggatatggaggttatcagccaaacattgctacctttggggctgatcagtttgacgagcagcatccaggggagtctcactctaaagttgccttcttcagctacttctacctattcatgaacctcgggtcgcttttctccaacactattttagactactttgaggatgaaggaatgtgggctcttggtttttgggcatctgcagcatctgcttttgcagcattattgctctttcttggaggcactgctaggtacagacacttcaagtctagtggcaaccctcttgccaggtttgctcaagttttagttgcagcaacaaagaagagtagagtcgagacaccagaaaccgaagatgacttctaccaaggggaagacgatgacaacacaactggtggtagaaaaatgctacacacccatggtttcaaattcttggacagagcagcagtggtgacatcaagggaactcgacaaccagaagcagagggatcacaacccgtggcatctctgccctatctcacaagttgaggaggttaaatgcattttgagactgctgcccatttggctatgtaccattatttactctgtagttttcacgcaaatggcctcgctctttgttgagcaaggtgatgccatgaaaactacaatagcaaacttcaggattccagcagcaagcatgtctacctttgacatccttagtgtagcaggcgtcatatttctaaaccgcagagttcttaatccactagtcagtaggtttaagaagtgcaagggtgatcatattgggctaactgaacttcaaaggatgggtattggactagtcatagcagtgatggctatgctttctgcaggaattgtggagtgctacaggctaaagtatgcgagcaatgactgcaaaaactgtggaggctcgagctctcttaacatcttctggcaagtccctcaatatgcttttataggagcttcggaagtattcatgtatgtaggccaattggaatttttcaatgcacaagcacccgatggacttaaaagcttcggaagtgcactatgcatgacatcgatatcgttggggaactacgtgagtagcttacttgtaagcgtagtgatgaaaatatcggcaacagacaaaatgcctggatggataccaggaaaccttaacaaaggtcatttagacagattctattttctattagctggcttaacattaatagatttggttgcctatattgcatgtgctaagtggtacaagaatattaagcatagcgaaaagattcaggaatatgaggaagatgacaaggtgtga

SEQ ID NO: 243 - protein, 598 aa, Nicotiana tabacum
MMACLELSKEVKMMKGEEIECTKDGTVDLDGKPAIREASGKWVAGIMILLNQALATLAFFGVGVNLVLFLTRVLKENNADAANSVSKWTGTVYICSLVGAFLSDSYWGRFKTCAIFQVIYVTGLALLALASQLYLLKPKGCGNRTTLCGEHSTMGIGLFYIAVYMIALGYGGYQPNIATFGADQFDEQHPGESHSKVAFFSYFYLFMNLGSLFSNTILDYFEDEGMWALGFWASAASAFAALLLFLGGTARYRHFKSSGNPLARFAQVLVAATKKSRVETPETEDDFYQGEDDDNTTGGRKMLHTHGFKFLDRAAVVTSRELDNQKQRDHNPWHLCPISQVEEVKCILRLLPIWLCTIIYSVVFTQMASLFVEQGDAMKTTIANFRIPAASMSTFDILSVAGVIFLNRRVLNPLVSRFKKCKGDHIGLTELQRMGIGLVIAVMAMLSAGIVECYRLKYASNDCKNCGGSSSLNIFWQVPQYAFIGASEVFMYVGQLEFFNAQAPDGLKSFGSALCMTSISLGNYVSSLLVSVVMKISATDKMPGWIPGNLNKGHLDRFYFLLAGLTLIDLVAYIACAKWYKNIKHSEKIQEYEEDDKV

SEQ ID NO: 244 - DNA, 5723 bp, Nicotiana tabacum
gttgagaaaatggatgtctgttaagcttggccataacttttttctgtcttttccatttgtttttttaagaatcttctttgtagttagcaacttgtttgcttaagggggttttataagacccttaaatacatatgaaaatccaagaaaactggcaaaaagtcttaaaacttttgtgaaaattactagcatttattgtttcttgaacttcattaagttctaaagtttacaacttcttttgttttgtacaaatgaaaaccaggagaggaaaaagatcagaggtatgttttattatatactatagtcattaatttgttatttaaggagactgaagagggatttgttttggttgtaggcattttggccttcaattgtgatgaaaaaatggttaaatattcagcctaagctttatgattttagtgaagatgaagttgacactgaaactgagagtgaggatgatggtatattgaatttttgtttataaatttaaattttttgtttcttggtttttatttcaagtgtttgattagtttctatttttggaaattttctagcatgttcacttaaagatgaaatggtgcatgaagatcatttttgtagaacaccggggaagcttaatgaatgccagcctcaaacttcaggtacttcttgaaattctgtttcagtgtttcagccagcttgcccacaccttgactgtttcaagtattgggtaacttttcctgacaagacttaggcaaatatgaagaaatcaccttgcgtttacacatacggagtctgtaccatcaagtttttgattttgctgaatttcatgatcatgcctaattttgactaaaaaaatactaggtcattttttcccatttgcttaagcctttctgggcaggtttacccgacacctctgctgatgggaggcagtaggtatctgctgatgggaggcagtaggtatcagtagagcagtcttgcatgtctgccccgacacaactcttataaaaagagaagagtctcctacaataacaacaacaaaaaaaaaccctgtatgataccacaggtggggtgtggggatggtagtgtgtacacataccttacccctatcttggaggtagagattgtttccgatagacccctggcaaagagtcttctgcttttgaaatataaccactattgaggatgcttcttctaatttcaatcatgtgaaaatcaccagaagctatattgcgcagattctctaaaagtgctactgcacttgcgtcggatcctccaaatatgcactattttggagaatccgacatatgtccgacgatgtttttgtagagtccgagcacataaaccaggagagaatattcttttcatattggtgaggctgtgttcatattgtgctgccttaatcttgacccttgagccattgaagccttatgcctggacatacacttaatatagttatatttgtccctttgatatttcaagatatgcaaattaagaaaagttggaatcattttaggttatactacccatatcaactaacctttaatttttgttctgtaaactatgctgactagttgcactgaacttactcagggaaaacttcaaccaagtattcatcaagacacaaaagagggaaatcagaaactctgagagttcaatacattaatacaaaagaagtgaggtttggctttaaattcagttcaatttgatttgctcttttgatactagaatccagttatatgaatttccttcctttggatattcgcatatgctccgattttcctcagagttactataggaacttggaatgttgctggtagacttcctgatgaggatcttgagattgatgagtggctttgtatgaatgaaccagctgatatatatattcttgggtaagtgttctatatatttggcaattttcgatcaatttgtatatagctcttcctctttgcatttaccgatatgaaatccatccagggccggaactatatgttccaaggggttcaactgaatccccttaatcgaaaaatactacaatttattttgcatatataaaaattgttgactccccttgacataaagggagcttctagtgtagggacaaaggtggctcaaaaattgctttagatcgcatgtttaaatcataggtgcagtatttttgcatttttctgaatcccctccccttgttagaattcctggctctgccactgaatccatcatataaggaagtcatggatttgcaacattgatcttataatcacgtgcaattttattatgcttatccgtgatgatttttcccgtcccctttttgcctctgcgcttacctttttgtctagccgaggcatcttttggtgctacatcagctaaaaaaacatagtcaatgaaagaataactaacatatcttaaagagagtagatttttaacgtagttaaagtccattttcgtgttttcttgaaactaaacaaagataaagcttagtctcaaagctgcatatgcatataaacaaaagttcatttctgctttcaccagttaaattcatctagtcgtttcgcataaaatagcttttatatggcctaaacatttagtcgctaagagttatgttacacgattgaattttatagcatgatttgtatcttccctttacagcttccaagaggtagttcctttaaatgctggaaatgtactgggagcagaaaatagaaggccaattccaaaatgggaggcgatcattcgcagaacattaaaccgaacaacagtagaacctgaagctaagctcaaaagttacagtgctccaccgtctccagtgttaagaacttctcctgcagctgatataattgctgatgttgtaaatactactactgcactagatataattgcagaggcgtcgatggacaccacttgctttgctggagataatatgatcaacctaaggaagaacctgcaaataaagagaatatatggcattgattgtgatagtcggttggattggcctgaacgttcgcttgatgcaacgcctcaagttctgtcttcaacttttaacttgaggcgagtatcgagcagttgtgctcttgcttttaagaatcaggatattggattagatggtagcaggttaaaaagaggacaccaaagttccggaaacttagggttgctttttatggatcaacaagaggagcctgaggtacttgatgcactttctgatggctctgatcaattttctgaagaggaaaatgattttttcgaaggattcacagagttcgaagatgaaagttcacttctaacacatgaggtgaattcacgtccgaggtatattcgtattgttagtaaacagatggttgggatatatgtatccgtttgggtccgtagaaggttgagaaggcacataaacaacttgcaagtctcctccgttggagtcggtttaatgggatacatgggcaacaaggtattgcttttttccttcatgcttatgattttcattgaatcaaatatcagcattcactagttgtagaaagtgaaatattgaagttaaaaagaacatttgaaacagaattattcgatacatgtgctagtgaaagtagcacgtatcgaatggaatagttaaggtatgcgcaagctggatccaacgccattgttataaaaaaaatacatttgaactttagagggctttatttccccttatctttgtctctacattcttttgtataataaaagtggtgtccgagccagtttgagcgcatcttgactattccaccgagtaactgctacttcccactcgcacatgtacgggacaaatttgtccaccaaagtttaggtagatgggaagaaatcacctagcatttgctccataagcaaattgaacctattgtctatacatgaaaccgctgactaattgatatgatatgcagggatctgtttctgtgagcatgtctcttttccagtcaaggctatgctttgtttgttcacatttaacttctggtcaaaaggatggcgctgatcaaaggcgtaatgctgatgtctatgagattatgaggcgcacacatttctcatctgtattcgacacagatgcagatcaaccacaaacaattccatctcatgagtatgtattagattggataatttgacgtatatgtttgagctgtatgttctaattttaaataagttatgctgcatatatataatacatacaccttcctttactgtaatcagtcagatattctggttaggagatttgaattatcgaatcaatatgttggatgctgaggtacggaagcttgtcgccagaaagcaatgggatgaacttctcaactacgacgaggtgagactcatcaataagattttggttcagctcttttttcgtttatataagatctccccctactggaacttcatcaagtaaagaatttttacgctatcaggttaagttgacaaacaacaagtctctacatatcaaacatgatacgataacttaggaatactgcgtcaatgtatataacttaagctctaatatcatatatttatctcatttgcagctaaccaaagaactccgaggtggccatgtttttgccggttggaaggaaggagtgattaactttgcaccaacatataaatatgaaatcaacaccgatagatatgtaggagagactccaagagaaggggagaagaagagatcaccggcttggtaagtgaaattctctttaaatatacaaagcatgatctttcaacgtattttgataatgcacattgaaatgattaaaagggcagcccggtgcaacatcctgcgtttacgcagggtccgaggaagggccgcactccaacaacctaccctgatgcaagcatcagtggctgatttcatagttcaaagttcgaaaccatgaccaataggtcacacggaaacaactttaacgttgctccaagggtcctttctgtacattgaaatgattattttcttaatatcgtgcaggtgtgaccgtatactatggttagggaaaggtataaaacaactcttttacaagagagcggaaataagactatctgatcatcggcctgtaagttcaatgttttcagtagaagttgaagtatttgatcaccgaaaactccagagagtcctcaatgttaacagcgccgctgtacatcctgagattctactagatagtgaggagtaagacttaaagcttcttcaaataagtagtcatcaaacatgacagtaattcagtattaataacacaaaattttttggtgttttcagttaggaatcagaaatgaagcatcgcgttcatatgtacgtcaatgcagagacgaatccaggatctagagtcgagggattcagaatagcttgtatgacgtacaagcctgcaaatctttccaaaatcatgttatgttaaaggtggataagacacgagatcaacgtcgtttctgtaagatacaacatacatatacttgagcaatgaagatttggcaccagtacagtgtgtttaatgttttgtaagtaaaaaaatttttgacataattttgagtgaattttcccttgtatttggtctttgacatcttaactgtatttttataacctggttttccttactttgaatttagtttcttttttcttcttttgtttcctaaatttccctgccagaaggagggtatttttgtatggttttgtaaattatgaaatattatttcttgatacacatttcaaagttttgtaatataaatgctaaccgaatacaagttttagtattccattcactaattca

SEQ ID NO: 245 - DNA, 1860 bp, Nicotiana tabacum
atgaaaaccaggagaggaaaaagatcagaggcattttggccttcaattgtgatgaaaaaatggttaaatattcagcctaagctttatgattttagtgaagatgaagttgacactgaaactgagagtgaggatgatgcatgttcacttaaagatgaaatggtgcatgaagatcatttttgtagaacaccggggaagcttaatgaatgccagcctcaaacttcagggaaaacttcaaccaagtattcatcaagacacaaaagagggaaatcagaaactctgagagttcaatacattaatacaaaagaagtgagagttactataggaacttggaatgttgctggtagacttcctgatgaggatcttgagattgatgagtggctttgtatgaatgaaccagctgatatatatattcttggcttccaagaggtagttcctttaaatgctggaaatgtactgggagcagaaaatagaaggccaattccaaaatgggaggcgatcattcgcagaacattaaaccgaacaacagtagaacctgaagctaagctcaaaagttacagtgctccaccgtctccagtgttaagaacttctcctgcagctgatataattgctgatgttgtaaatactactactgcactagatataattgcagaggcgtcgatggacaccacttgctttgctggagataatatgatcaacctaaggaagaacctgcaaataaagagaatatatggcattgattgtgatagtcggttggattggcctgaacgttcgcttgatgcaacgcctcaagttctgtcttcaacttttaacttgaggcgagtatcgagcagttgtgctcttgcttttaagaatcaggatattggattagatggtagcaggttaaaaagaggacaccaaagttccggaaacttagggttgctttttatggatcaacaagaggagcctgaggtacttgatgcactttctgatggctctgatcaattttctgaagaggaaaatgattttttcgaaggattcacagagttcgaagatgaaagttcacttctaacacatgaggtgaattcacgtccgaggtatattcgtattgttagtaaacagatggttgggatatatgtatccgtttgggtccgtagaaggttgagaaggcacataaacaacttgcaagtctcctccgttggagtcggtttaatgggatacatgggcaacaagggatctgtttctgtgagcatgtctcttttccagtcaaggctatgctttgtttgttcacatttaacttctggtcaaaaggatggcgctgatcaaaggcgtaatgctgatgtctatgagattatgaggcgcacacatttctcatctgtattcgacacagatgcagatcaaccacaaacaattccatctcatgatcagatattctggttaggagatttgaattatcgaatcaatatgttggatgctgaggtacggaagcttgtcgccagaaagcaatgggatgaacttctcaactacgacgagctaaccaaagaactccgaggtggccatgtttttgccggttggaaggaaggagtgattaactttgcaccaacatataaatatgaaatcaacaccgatagatatgtaggagagactccaagagaaggggagaagaagagatcaccggcttggtgtgaccgtatactatggttagggaaaggtataaaacaactcttttacaagagagcggaaataagactatctgatcatcggcctgtaagttcaatgttttcagtagaagttgaagtatttgatcaccgaaaactccagagagtcctcaatgttaacagcgccgctgtacatcctgagattctactagatagtgaggattag

SEQ ID NO: 246 - protein, 619 aa, Nicotiana tabacum
MKTRRGKRSEAFWPSIVMKKWLNIQPKLYDFSEDEVDTETESEDDACSLKDEMVHEDHFCRTPGKLNECQPQTSGKTSTKYSSRHKRGKSETLRVQYINTKEVRVTIGTWNVAGRLPDEDLEIDEWLCMNEPADIYILGFQEVVPLNAGNVLGAENRRPIPKWEAIIRRTLNRTTVEPEAKLKSYSAPPSPVLRTSPAADIIADVVNTTTALDIIAEASMDTTCFAGDNMINLRKNLQIKRIYGIDCDSRLDWPERSLDATPQVLSSTFNLRRVSSSCALAFKNQDIGLDGSRLKRGHQSSGNLGLLFMDQQEEPEVLDALSDGSDQFSEEENDFFEGFTEFEDESSLLTHEVNSRPRYIRIVSKQMVGIYVSVWVRRRLRRHINNLQVSSVGVGLMGYMGNKGSVSVSMSLFQSRLCFVCSHLTSGQKDGADQRRNADVYEIMRRTHFSSVFDTDADQPQTIPSHDQIFWLGDLNYRINMLDAEVRKLVARKQWDELLNYDELTKELRGGHVFAGWKEGVINFAPTYKYEINTDRYVGETPREGEKKRSPAWCDRILWLGKGIKQLFYKRAEIRLSDHRPVSSMFSVEVEVFDHRKLQRVLNVNSAAVHPEILLDSED

SEQ ID NO: 247 - DNA, 8618 bp, Nicotiana tabacum
  misc_feature (6743)..(6752): n is a, c, g, or t
ctccgaaatcacttgccggagagtcataaaaagacctaggatttgttgatcaccggactaacgccggccatggctatgcaagctggagtaggcttaactaagatcgtatttatcgtcggagcaggtacacacacacacacacttgttcttcgactattatgttctatttttttttgttgagatttttgctaattttgtttgtgattgattttagttatgtgatctgataatatatgtgtgttgtgtgcatattagggtatacaggtactttgcttttcaaaaacggtaaattatctgatgtgataggcgagcttcaggttagttccgatttgctttgtgttatttaaattctgttatagagattgtacatttatatattgttttgtgtgcgagcgcgcgcttgcatgtgtgtgtgcaggggcagagctagcccttcggctacgggtttcgctgatctctgtagctttggtccaaaccttgtcttaagaaattcattgaattatgtataaattcattggaattgtatccatcattttatttcttttcaacaatgctgtgactttgcttttactgtgccgaggatcggtctgcatacacactaccctccctagaccccacttgtgggatttcacttagtttgttgttgccgttgttgttgtgtgtataaattattaatttagaacccagtaatatagaagtactagaatcccgaatctataagtttgaaatcctggctccgcctctggtgagtgttgtgtgttcaatgagcttggactgggtaatttaaattgaaatcaactatttgcatgtggtatagtgctttaatcgtgtaatggctcaatttatattctagtaataccaatttctaaatagacagctgaataagagtgaaaaccaaggcaagttatttagtatgcatgtgaaagatagaggtgccttagtcaactagtgagtatgatcttttttgtgaacaataatgcaacgattgactaggtttcttattggggtcactaatgctgataggtaaaatacttcaaccacatagtggtttaatttatgttccattaattcccatctcgaagtagatgatatcaatgagagtgaaaacaaaactagatgaagctataatatgcctttgaaagttagcagtgccacagtcaactactgattatgagctactttattaactaaaactgcaatggtggaataggttttgaaggttggtttgcatattatggtgttatttgaataaatgtctgaggagtcctgtgacaaattgtaacaaggctggatctatttgtcaatttaaaaaccttttcttagtttttttttccgcgtgcgttgagcttaagtgtttcatgttaaaaaatttctggcagaatttggtcaaaagttatgaaaaatcaggggaatcagatggtggagaatcggatgtcattgctgcacaggtacccagataatattagcttaaattatgaaggcttggtcttgtcaagattgttaatgtactactcctaagtaagtagtaatatgctttttagatgatcaatccaagctgtgatctgttttatcaatgtagaatcaaccatcagagaatacattttcatttctatatttcaattttcttttagttgaatgacaagatcactttgcaatgtagtttctatgagaacttccgtaattggcaataatttggttatattctgtgcttttgcctctcatcttgtttaagtgtagttttacaagtgatatctgaattgattttggagttgcctttgcttatcatctttggggaggggtcgacaaaattttctgtctaatttgggtctttgcctctccctctgggaggtggatggcgcccacagtatctagacattgttgcttaggcatgagatgtggttttgtaatttgttatggtgttaaggatgaatgtacagataaatttgccataaatttatgtaaaatctgctgaaaagaaataccagtgtttaagatcccttgttcatgggtcaagaaacaataagctagtggtgaggggcaggacgatgattgtctgcatgtcattgtcccagctacctctgctatgggatcttttcggtcaatgtataggcaagatttgaaatccacagcgaatcttctttaccaaaaatagcttacgaagttgtttccctagtccacttgtcaaaagaaaaaagttatcacctgtagtcctactattgtgtatagaccaactatatatgggcttgtgatttgctacatggtacaactggaatctaattgatttttttgttgctttgacaggttcgtaggttggcactggaggttcgacagttggcttcggcacgaccaattactgttctaaatggaagttctagcggtatctctactatcctttaactgatgccttctcatgctagattttgtctatcttgcctttgacatggaagaagtttgctttatattagatgatgttccctaattctcatttaccctggcaggtgactggacatctctgatagtgccagctgctgcagtgggtgccttaggttatggatacatgtggtggaaggtgaaataaaccttatattgtttatttattaattttccatctcaaaggggattgtcactaacgtgatgattactacatgaaggtttaaataatatcacattgaaatacaagatatttttagacttgattaaatgaaagattcagtgttctttacttgataaaaaagtgaaagattcagcaagaatgtaaaccatcaatatccgggtatttcttttgattctttttggtaccagttcattaagtctagggttcaagtttcttttctcaaaagcatgaagggttcaaaaaaattggattagattttaaatatgcttgaagtaagttggggcatagggagtaatatgcatgtttttgtatgtatttagttagctggagttaggtttatcttagataacaaaccttctacaaagaagtaagtgaataaaagttaagagacgtaagcgggagacaccaaatttctgcctaatttttaatatttcatgaaatgcttgccttctctcaccgtctctaattttattccattttcttcacctctttcgcttgtaatacttgcagggtctgtcattctcggaccttatgtatgtaacaaaaaagaatatggcaactgctgtttcaaatctgacaaaacatctggagcatgtctctgatgctcttgctgtgagtatcttccttatatgcctatggtttattcatgagttcttttaatcttggcagatacaagcctttccatgtattcaagttataacatgagcttgatagatgctatatatgtgtgaatagcatactgttactgctttaccgaaacccttacttccccaggactcttgatgttggccagaaaccctctttcccaaattcaattggtgtggttgtgtttttctgaatttacttttatgatgttaaatgacttcgggcggaggaggtggagaggagggagaggaagtggagcaagcccccgtgttatcaaaggcgcaaaagcgcaaaaaagctctaaggtcaattggggttctaagcgcaaagcgcaaataaagagtgggctttaataaataaaggcacatatgaagaaaatacaaatatgggtgtgtggtctaagactaataagtataagcatgaataacaaatatatagacaaaggaattggaatttttttatgataaattgatatatcaattgtttagtgttgccgctttaggatacgctctttagcaaggaaaagtatgccttggagcattgatgacgatgttgaagcggccgctaagcgaggcgaaactctcaacatgttttgcgcgtcacttcggggcttaagcgcgaactagaacttggaacctacctggattgatgtgtcctatatctctgcataaatgtttgaccttctaattactgaaacttaccctgtcaattctttggcatttaaatcagactgtaggtagagtacccaaagttatattggagattattggactggcctatccgggcttgcacatgcattgtttgttagttgctgcttctgtgcgtcatggcaatatgtgccacttgtccctgcttcgaggaacccccttttctgcaagatttttgaatctccagggagtgattaatttcagctgccatggttgagcttcaattgataatataaattatggacaaattagcttagtttcacactgggaatacactgggtttgttattgttattgtgtagcttagtatggacacacttgcagtgcaaagttcttgcttacagatgctgtcattgtagcttattctgattagttggaatttgttgagagagagaatatgcagcagctgtctgcaggaaacagtaagttcaaggctacgaagtggggattgaaatattaatacggtcaatgtgaagattattccaactaatctatccacagttgtaagtttcttaagctgacttggatcatcaagtctatggtcctcttcaagggtgatgtgcgtttgaatgtacggatgatgtatctcttttattcttgacttgtttctaagagccgggcgacgattttattaacaagaaagagggggctaacattgagggaagcctcatattcctgctacttttctgcatcctgtgaaacatatagagatttacttttgataaatgtatgtcagaaattacatagcttcttccgtgctacaactttgacatatttgatatttcaaatgcataaattgtatatgcattcagagttgtttctaaatgttatagatgtgtgtttgtacttatgtataatgtattgataattcaatcatttcatattgttctgttttgtcctttgatcaggccacaaagaagcatttgacacagcgaattgagaacgtggatgggaaattggatgagcaaatggagatatcaaaactattaaggaatgaggtgcaaatctactccacttcaattgttgtctttagttgtttatgagacttgtcatctgatttcattgcccgcactccgttattttatttatatgtttctcctatagtggaaatgtcaagttcttgtattccattgtagatgacaataagagaatcatattgctagtttgcctttttcaaagttaaaatcacaaatctgctgctataatgaaacgtatggagtgttggtatgattgggttttccttgttctggaacaggttaatggtgtgcgtggtgatctatccaagattgattgtgatttggatgaattaaaagggttggtttatggtctggtgagttctgctttctggcatagtgtgattgcaaggcttttttttgtttgttttattttgaaatttatgcggagtacaagcctttcacatgggagcagagacagtggaaaagtcactgtctgttccggccacttggtcactctgcgcgtctatattaacatatatttacgtgtgtattacataaataatatctgtcacctaatgttatatccactgaaccttttatctcaaatctatctggaattgtaggatggcaagctactatccttggaaggcaagcaggtaagaaaaaaagtctccatttcagcttttaggctactagctctgttttattataattagcccagaaaatggaaaagaaacaaggtttgaaatatggtttctggagcttgtaatgaatgcctccaaggtgtcataatagatatttagtactaagaactgcacttactgttgataacaggaccttacaaatgctggtgtcatgtacctgtgcgattttatcagcgggaaaagggtgaagatgcctgaaacactgcaggttcgtagaattcttgatgagaataactttttccactaaaatgatgcttcctcagctttatgctttaacagatttgacttcttatgcttctatttcactccctgcgttggatagaatggagtagtgtgggtatgtctagtgaagcagaataggattaaggatccttattcttaaagcaaagcagatttagacaaagctggttgttgactggaaacttattctccgaaaatgataggatttgcttgaagttttttgtattaaaagtgcagagaaatgctctttggaaattaatacagttatctaaagaaccacagaattggatgtttgtcgttataattctgattttggtcctggagtgaaggtgggatagatggaaaattttgcgttatatagaccaaaaactatttatcgcttcgcgaaagttgaatcagcattgagattatatatgagatgttttatgcgaaatcattgggagagcaaagaacaaaagatagtggaaatagtattgttttttatgtatagacatttaaaaaaggaaatatctttggttgatctggaagcttcttttaaaatggaaattgcaagtaattattgaaagtaggatctctagttgaagattcagcaattatttctttttgctgcggtgagtgaacgagataatgcaactccataatccaattgtgaacatcctgtagtggctgatactttgactttttttgtttattatttaaccagtgcttgtgtgtagagaccctcttcattcatcatttgatgaagctaacaacttagttctttacttttactatttacttctatagtgatatttttattaactctacaaggaaatgaagaaagtgttagttccccagatggtttttttttttttttttgggggggtgggggggggggnnnnnnnnnngggtggggaggtggggggatgtcttacccctgagagtttggaattgtaaagttttcttggtgtttcaattcctaggtattttatacctatgagcataccttgtcctttttaagtgatatggcactttgattgtttagcattattagatgttggttatcaataacttttctaatcttaatttcctactgcaggaacaacttaaaaccgtgggcaactctattcctagtctaatggtactttcgctaacttggatttactagatgtatttttccaagtatcttttcttggtatttgccattttcatgcagttgctgtgattgtgcgtttatatttcaattttcatgaatgtaaatggtattcgtctcttattcggaggaatgaatctatcaaggcacgttccttacaaatggaaaacggaacagaaaacttgtttaaaatttatcaaaactttcataacaattaatgaaagatattcatttcctattccatcaaatgcatggactattcctggatgctggtacacatgttgatttcttggatatatgtgaaaccaaaaacattcctctaattggaatagactcttcagcacaaggctattaagttctctacaaacatagtgttttattacagatgcattctatgtgcctgtaataaaacagtctctctaccctagacaagaggggttgctctgatggtaagcaacccccacttccaaccgagaggttgtgagttcgagtctccccaagagcaaggtgggaagttcttggagggaaggatgccgggggtctatttggaaacagtctctctaccctagggtaggggtaaggtctgcttacacactaccctccccagaccccactaagtgggattatactgggttgttgttgttgtttgcattctatgtgcctttcatcatttttgcgagtagaaataacaagttttgcaaatttgaagcagtgtggatatggttgaaccttttatgatttcagattgaaaaggattgatttccacgtgcatggtttatatgtcatgttactgcccattgtccatcacctattagcattctgtggtttatatttcttctcacttcatatggtttcggcaaaaatcagtaaccttttataatgcacttgcatttgacttcacataatcttgttatagggccttaaagaacttgctgactcctcaccgcaagcaatgaacagcatatatattacagaaattgctcaagatggtactgataagttattagagccacctaggcccctattgaggtatttattttcagtttcagaattctttcttcataagtttaacgccccatccccaccattctcttgtttccttgagttgatggtgtagctgcaattttaatatccttttttcgcacttcccttttgctcttcacaaaatctgccctgcatatggggacattcactctctatttcttattcttttggaggggtgggtggggagttacctatataggtgaagatgcttatatatcctctaccccgcaataaccttcattttttctgatcatcttttcgttcatggatttaacaggacggcctctatcaggtgctgaatggcggtcatttggattgtttttgggttatattatacaagagttgaccatagctggttttcaccggtatactcaatgaatgtattcaaatctgaagatttgtacatgctgagataagtacatgctgctatgtggtagagtacaacaatattacattgttcatatttcactatctaattgtttggagatcttaactgttgtttcttcacaacagggttctatattctttagttatttttgtacgttacagagatttttatcttagtttgatatgcata

SEQ ID NO: 248 - DNA, 888 bp, Nicotiana tabacum
atggctatgcaagctggagtaggcttaactaagatcgtatttatcgtcggagcagggtatacaggtactttgcttttcaaaaacggtaaattatctgatgtgataggcgagcttcagaatttggtcaaaagttatgaaaaatcaggggaatcagatggtggagaatcggatgtcattgctgcacaggttcgtaggttggcactggaggttcgacagttggcttcggcacgaccaattactgttctaaatggaagttctagcggtgactggacatctctgatagtgccagctgctgcagtgggtgccttaggttatggatacatgtggtggaagggtctgtcattctcggaccttatgtatgtaacaaaaaagaatatggcaactgctgtttcaaatctgacaaaacatctggagcatgtctctgatgctcttgctgccacaaagaagcatttgacacagcgaattgagaacgtggatgggaaattggatgagcaaatggagatatcaaaactattaaggaatgaggttaatggtgtgcgtggtgatctatccaagattgattgtgatttggatgaattaaaagggttggtttatggtctggatggcaagctactatccttggaaggcaagcaggaccttacaaatgctggtgtcatgtacctgtgcgattttatcagcgggaaaagggtgaagatgcctgaaacactgcaggaacaacttaaaaccgtgggcaactctattcctagtctaatgggccttaaagaacttgctgactcctcaccgcaagcaatgaacagcatatatattacagaaattgctcaagatggtactgataagttattagagccacctaggcccctattgaggacggcctctatcaggtgctga

SEQ ID NO: 249 - protein, 295 aa, Nicotiana tabacum
MAMQAGVGLTKIVFIVGAGYTGTLLFKNGKLSDVIGELQNLVKSYEKSGESDGGESDVIAAQVRRLALEVRQLASARPITVLNGSSSGDWTSLIVPAAAVGALGYGYMWWKGLSFSDLMYVTKKNMATAVSNLTKHLEHVSDALAATKKHLTQRIENVDGKLDEQMEISKLLRNEVNGVRGDLSKIDCDLDELKGLVYGLDGKLLSLEGKQDLTNAGVMYLCDFISGKRVKMPETLQEQLKTVGNSIPSLMGLKELADSSPQAMNSIYITEIAQDGTDKLLEPPRPLLRTASIRC

SEQ ID NO: 250 - DNA, 3077 bp, Nicotiana tabacum
ttgattcaaagtttagaaactagctatctaagaagtaagaaggtagctgctgaaagttgagccagaattccatgtattcaaaatgaacttgaaaatgtctcttgtctcaactttgacctatatagagataattttcaacaacaattctctataaatagcaaagaccatatccagttaaatgcaccaccaacttattcttatattgcttaactctctttcttattctctttaattttcaaatggctcctcttcaagttcttgcaatatttttcacatctttgattttcatgcaaatttatttgggaaatgctcaaacatttatccattctaaagcagcttattatccaaattcagaagaaaaaggaacagaaagtaagattcattctcatcataaaaacatgataaaattatataaaaaggataggcaaccgagtgcacaaagcatgcatctcgcgttcacgcagggttcagggaaaagccgcacctcaaaaggtgtggtatagatagtctatactaatgcaagcattagtgactatttttacggttcgaacccgtgacctataggtgacacgacgtgtttaattatgttagaatagactaaaatactggtgttttaattttgatcaaataactgttttcttttttaaatgtatgcagctggggcatgtggatttggtacttttggagcaacaatcaacggtggagatgtatccgctgcatctgatctttatcgagatggtctaggatgtggcgcatgctatcaggttctcgtctgtccatattacttgtcttgttttttgcacgcccgttaaaaaaatattaattcaaggaaacttcgactaaattattcttatttattctttgatttgaatttaatatcgctcttattttcaccatattaatctctatccacatatgttagcggtaagggtaaaggtgaaaataataataattaattctatcttgatttcttaaaatgataaatattttgattaattatttttagtagctacgataagtaaaatggaccaaagggaatataacacactctctctctctttctaaaatttgctccaaaacagtaatatcttctatatttggagattctataaatttaaaatttctcattttttccttaatggctttgctttaataaccataataatgtcgcggcatgttttagaccataaattttagtgacacttttagtatatcccaaaagtcagtactttttaaaattgtgtccattcaatatataaagtataacgaaggcatcgaggaatatattggttaatccactatggagtttaacttttatgtactaataatgccaaaagtttattttacactatattaaatttcttaaaagataatacatatttgattagtaacttagaaggtaactactagaacatgtcgaaatacactaattgttgtaagattcttatgttgttcgtgtatataagctaaatccattgtctaccaaggaagaaaatagtagagtcaataacgagctaagacttcatatgtttaattaagttgtcatgattccaaaatcctgaaatattaataccaaataacacgtccacctaatctcttaaactaaaaataactgacgagtatattatatacgtataattcatgtataatatgtgtataattatgaaaaatcaacatataattcatgtatacgaccagctaaaaaaattaaacaaataatctgaccggctatttgtataacaatctatcattttattgccaggtgaggtgcacaaacagtaactactgctctgataatggagttactatagttataactgaccatggagcaagtggtggcacagactttattctaagccagagagcctttggtcgaatggctcagacaaaagatgctgctgcctctctattatcacttggtaatgtggatattgagtatagaaggtacgtagtttcttattgcctattgagctagtgtcgggagtgggttcggccgaaccagttagctttggttcgagtcctgtattttatcttaaaaaatctattgaatatatataaattattaattttgaacccagtaacataaaacgattagaatctcgaactcataagattgaaatcttgattttgcctctgttaatagctactcactctgtttcaaattatgtgtcactttccgcttatcgagacttaacattcgtacaattttcaataaacagggtttcctgcagctacccaagcaagaatattacaatcaagattgatgagagcagcgataatccttattacttggcttttgtaatatggtaccaacaaggcaaaacggacattactgctgtgcaattatgtgaggtatgaatttaaaaaatacaacacactaatatgtacgagggctgatgcatatgggtggaagtggtgtcatccgacgtcgtttcgccaaaaaaaaaattaaatatttatactaatattctacaaaaatgaaacaatatataataatgacaccactttttggtaaagagtacttcttggttcactggtcacgcctttcaacttgtgaaaaagataatattagataatacttacaattatttattaaatacgatactttttacaaaaagttatacgtacgctcctgaatacacgcagtgcaataatttaatttaaaataaaatccttttccaatatgcagacacaaaattttgtatgcaagctattggataggacacgtggagcagtatggactagttcttcacctccaagaggaccattgcaaataagaatgctactcagtactgatgatggagatgagacatggattgttcctgtcaataatatacctgaaaattggaaagctggtgaaacatatgactcaggaatacaagtggattaatttatctaaaaaattacaaagcatttaaatttatatatagtttttgttgattatatttgtcatattaaaaagtctatatatatagtgtggctcttttaatttttttatactgtagtacgtcccaaattcatgaatcattgtattgacaactaataaaagttcgaattttaatttaatactagtttct

SEQ ID NO: 251 - DNA, 756 bp, Nicotiana tabacum
atggctcctcttcaagttcttgcaatatttttcacatctttgattttcatgcaaatttatttgggaaatgctcaaacatttatccattctaaagcagcttattatccaaattcagaagaaaaaggaacagaaactggggcatgtggatttggtacttttggagcaacaatcaacggtggagatgtatccgctgcatctgatctttatcgagatggtctaggatgtggcgcatgctatcaggtgaggtgcacaaacagtaactactgctctgataatggagttactatagttataactgaccatggagcaagtggtggcacagactttattctaagccagagagcctttggtcgaatggctcagacaaaagatgctgctgcctctctattatcacttggtaatgtggatattgagtatagaagggtttcctgcagctacccaagcaagaatattacaatcaagattgatgagagcagcgataatccttattacttggcttttgtaatatggtaccaacaaggcaaaacggacattactgctgtgcaattatgtgagacacaaaattttgtatgcaagctattggataggacacgtggagcagtatggactagttcttcacctccaagaggaccattgcaaataagaatgctactcagtactgatgatggagatgagacatggattgttcctgtcaataatatacctgaaaattggaaagctggtgaaacatatgactcaggaatacaagtggattaa

SEQ ID NO: 252 - protein, 251 aa, Nicotiana tabacum
MAPLQVLAIFFTSLIFMQIYLGNAQTFIHSKAAYYPNSEEKGTETGACGFGTFGATINGGDVSAASDLYRDGLGCGACYQVRCTNSNYCSDNGVTIVITDHGASGGTDFILSQRAFGRMAQTKDAAASLLSLGNVDIEYRRVSCSYPSKNITIKIDESSDNPYYLAFVIWYQQGKTDITAVQLCETQNFVCKLLDRTRGAVWTSSSPPRGPLQIRMLLSTDDGDETWIVPVNNIPENWKAGETYDSGIQVD

SEQ ID NO: 253 - DNA, 6138 bp, Nicotiana tabacum
ctctactttctccattccccgccggaaaatcattcgttcgccggcgaactgtcgccggagaagttacacgcgctcagaatctctgatatagtagtgttccttgtttctcgagcgtagttaaatcacccggtgtcgccgctcgccggtaaacctcttcgtatcgccggaaaaccgcctgctcgcaggtgaactgtgtcaccagagaatacagcttctctattatcctttggtttcgagtagttgaatttgttttcgagtagttgaaccactcggacggtgaaatcgttttgatctccgagttggactcggttttgtgccgcatcgaggtaatgtggatagcctaaggctgtgtttacggttcattctgctgtagatcgtgttctaggacttagctggcggttttacaagcgctctgtttttgttgttgctgtttttttttaaatttaattttctggtgaagtgtgggagaagacgccggagtagaggataggtttgcaatactatgctttttagaacatttgtatgcgcagtgtaataataagaagagtgtgaggtttcgtctaactttttttttttgctttgaaaatggtgaatgtgatttggttcttttcgtttgaagtctggatttcgatcattcttattgttttttatgaaaattgaatgacttttacattatgttttagtagtggtagtattggaacgaaacagtcccaatagaggagaagagataccgaggattcatatagcaagcactaactagttctagattgatgcatattagcagttgtggagccacatgcaaggaaggggattgaatccccttttgtcggaaagttatactgcgtaaatagggtaaaagcaattttttacacgtatataaacttttgaatccccctagcataaagagaaaggcaggttcaaatcccaaatatgcctctcttttttttttgaatcccctagttagaattcctactgcactgtagttgttattttgttgttttatcagtggtttcttatgcataatctacagtctaaactttcaatcaagtgcgaatactatttctgtgatttcatattttactgaatcacatgtttaggtgatagtttttggtattgctaattctgatttttttgtccatattcgaacatcagtaaagattttttgtacttgtcctaatctgtaaaagaaaaaggaattgtaattgaagtatatgaactttgtctatgagtttaacatttttcttgaatggttcgatctgaaggttgctaatagtacgttatttattactaattcattttctgtatggcaggtggaacttggaagggagagtcgggatgtcaagggaggctatgttggagtttttgaagcgaaaaaggcttcaacgaaagaaaccagaatctatgaatgattcgacttatgtcagcaatacgatgagtagaagtggaggagatgccctaagctcttcagcttcatgtggtgttagagttcatgtaaatgcagggtgggggacttccttaaacagaagagatgttttctcaaagcacaaggttgccaagtttgatacgtctaatcttgactggactgataaaattccagaatgtccagtttattatccaagtaaagaggagtttgaggatccgctggtttatctccagaagatagctcctgaagcttctaaatatggtattgtctccattaatattccgtgtcaaataaattaatgtcttatgtttctcactgcaaacactattctattagtttccaggtagaattttaccttctagtccttattgagtacgttcctttgatggaatctgcctgttgagaacattgatttacttgttatctagagtcttcggcattatctgtagtcctctgtccattttgatttttgaaggtgaaaattgtcccatctattttcaaaaacatattaatccttcttgctttgtctggactgtgttcttgtataaacttagttgctagtgacttggtttgttctgtcagattcatttgtttgataagagttgatactatgtttgaaataacaggaatatgcaagattgtttcaccaatcatggcttctgttcctgctggagtagtgttgatgaaagagaaggctggttttaaattttcaacgagggtacagccacttcgtctagctgaatgggatacagatgacaaggtcacatttttcatgagcggaaggttagtttttcattcgtatttggtgttctgttaattgattatttgtcagcttttgaggaataatatggtttttcagaaactacacatttcgtgatttcgagaaaatggcgaacaagctctttactcgtaggtattgtagtgctggatgccttcctcctgcttatatggaaaaagaattttggcatgaaatagcttgtggaaagactgagagtgttgaatatgcatgcgatgttgatggtagtgcattttcatcttctcccaatgatgaacttggaaaatgcaaatggaatatgaaggtgtagatttcagaacaaagtttctccttatcgtgctgttcctatatggagtttttttgttttgttttaagcgatatgttctattgtcagtataaaatgagtcaatgtgccttgcatctagcgttcatatttattgctgctacgttcatgttttgaaacattttatcagtgttagccttgtcactgttgtttgatagagttccgctcaatgttctcttgtactcttttcctctttcttacggtttttacctttttccttcctttctgaacctaccacacgaaggacaaaataaaatctttctcataattttccatgcatcagctttccccgctcctgtcagcattagatgtagtcttaaaggtggtctatttgcccttttatattccctttctgttctaataaatcctctatttgtggtttcagagattttcttgcctacctaaagcaacacttcgactcctcgaaaaagctatcccggtaaacagattagttttttcatctttttcgttgaaattttagtccaacctgaagttatctcacttcctaataatgtattttctcttctctagggagttactgaaccaatgttatacattggaatgctatttagtatgtttgcctggcatgttgaagatcactacttgtacaggtgtgtgtgatttaatttgaagtgtacgtcctagtctggttaatttggggacttaccttttttcatttgtgcatatagcatcaattatcatcattgcggggcagcaaaaacctggtatggtgttccaggtcatgcagcgctcaactttgaaaaggttgtccgccagcatgtctataacaatgatatcttaaacgctgatggggaggatggagcttttgatgtgcttttgcagaagacaacattgtttcctcctaacattttatcagaacatgatgttcctgtctataaagctgttcaaaagcctggggactttatagtaacttttccaagagcatatcatgctggatttagccacggtaagcgtctatagttttgtctaaactttagagttaaaggatgcataataccttaaaacatgttggtctgacatagttctccaacacttctctacttttggccctaattttttttattactcttgtagtttcatcttagttgacaattagcattagtgaattctatttctctaatatgtaggttttaactgtggcgaggctgtaaactttgcaactggtgattggttcccaattggttcagttgctagccgtcgttatgcactgctgaacagggtgcctcttcttccccacgaggaacttctctgcaaagaagcaatgcttttgcgtatggatttggaacttcaaaatcaagcttattcctctgcagatttgatcacccaccatagcattaaagtttcttttgtaaatttgatgcggtttcaacatcgtgctaggtggtgcctcatgagatcaaaagcattttctggtgtatcgtcattttcacacggcactattctttgcagcatatgcaagcgtgactgctatgtagcatatctgaactgcaactgttactcacatgcaatgtgccttcgccatggtatgttattgaatggaaccttttctttgtctttatttgttaattatacggggaagctccttcataaaataaaaaaagaaagaaaatatccggagacactgaactgatgatcagtatgatggttgtttctttatcagatcctaggtctcttgatctaccttgtggaagcagtagaaccctttgcttaagggaagatttttcggacattgaaactgcagcaaggaagtttgagctggatgatgttgttttgcatgaaattgggcaatatagagaaagtgatgactacagtctccttttgaacatgtttccacgagctgaagaggaaggctatgttccattttgtgaaataaagtttgaatggtctgaggaaaccttgaaaactgaggactgggttgaacaggcctccaatgcttctgcatctagtattggaattgtgtcacgtgttggttctcccatggaccaaaaagattgcctttctgctaatgttgatgtaagtgatcatcgataaagttactatatctgtgctacttttgtgatttctggaatactgaagtggaaatgcttttatttgatctcaagctaattcaatttacattgtaggtacaggaaaatgctaactcaaacttagggaatagtgtatctgtcaggccttctagagacatttctggatgtgaaagtgaaagatcagttttttcacctggtgatgactatttaaaggttcatgaaaaagtagctcatgtttcagatgctagaactgttgtagatcaagacagtgatgagtctgatacagaaattttcagagtgaagagacgttctagaacagaacatgggaggaggagtacacatgattcaatatcagttaatgttgagcaccaggtattgcattctggggtcttagttcaatacaacttttctctcattctgttttcaaaattaaagttctaagttaaacagttctatggaagtggaaaagcgggtgtcaaataaatttttgttggtttctatttggatcgttgaatacgtctatctccctttgttgttttgcatagattagtccttcagcttacctaatatgtatcctaatggtagtaaacccttttgaacttttgttaccaaatctggagcaaaataagtttttagcctatttaattacagggctttgattacctggtcttgctagttgtctgtgtcaatccagattggtattttatgttcattgtttctgatttgcaggtaaacaattatgtcaaactaattgctttgtttgagtggatagtatgagaccccttatatcatgtgtcaaaagcaaattttatgaagctaatgttcaaatgctgtttccattgaccagttatagttacattcaccttacttgctactgtgtggacattcgtcatttttggtgtgaaattgtactaagctactgagtgttattggcattttttttccagggttacaaacgattaaagaaacatcaaactgaaggacggcttgggccattatcttcatcagactgttccatggctgatgatgcaactcatagttacaatggtaattcaatccattctaaggaagccttggattatcctttaagagacaaatcggccagaagtggtacagttcccatctctattaagtccaagaaaggggataatgcatcgagcaagcaaaacgagaataaaagagatgaaaatttcgactatgggttgggtaagactgtgggggaaccacctccgatagagatagggccaaagaggctgaaagtcaagacccttcaatttttaagtttggaggaagaattgaatagctcataaaatctgactttactctaactcccattttctctaatggggatctaacaaaaggatgaaaagctaaatattttgggggagcagcaatgcaacagttaaccaaaacttagattaaggaggtacattctttgtgcaggcctctaattggggcaaatggcgcactggtgattcttatggttctcgggccatggtgtttttttagtcttaaaaggcaggagaacgtctctctctgtcgtgatgga

SEQ ID NO: 254 - DNA, 2526 bp, Nicotiana tabacum
atgtcaagggaggctatgttggagtttttgaagcgaaaaaggcttcaacgaaagaaaccagaatctatgaatgattcgacttatgtcagcaatacgatgagtagaagtggaggagatgccctaagctcttcagcttcatgtggtgttagagttcatgtaaatgcagggtgggggacttccttaaacagaagagatgttttctcaaagcacaaggttgccaagtttgatacgtctaatcttgactggactgataaaattccagaatgtccagtttattatccaagtaaagaggagtttgaggatccgctggtttatctccagaagatagctcctgaagcttctaaatatggaatatgcaagattgtttcaccaatcatggcttctgttcctgctggagtagtgttgatgaaagagaaggctggttttaaattttcaacgagggtacagccacttcgtctagctgaatgggatacagatgacaaggtcacatttttcatgagcggaagaaactacacatttcgtgatttcgagaaaatggcgaacaagctctttactcgtaggtattgtagtgctggatgccttcctcctgcttatatggaaaaagaattttggcatgaaatagcttgtggaaagactgagagtgttgaatatgcatgcgatgttgatggtagtgcattttcatcttctcccaatgatgaacttggaaaatgcaaatggaatatgaagagattttcttgcctacctaaagcaacacttcgactcctcgaaaaagctatcccgggagttactgaaccaatgttatacattggaatgctatttagtatgtttgcctggcatgttgaagatcactacttgtacagcatcaattatcatcattgcggggcagcaaaaacctggtatggtgttccaggtcatgcagcgctcaactttgaaaaggttgtccgccagcatgtctataacaatgatatcttaaacgctgatggggaggatggagcttttgatgtgcttttgcagaagacaacattgtttcctcctaacattttatcagaacatgatgttcctgtctataaagctgttcaaaagcctggggactttatagtaacttttccaagagcatatcatgctggatttagccacggttttaactgtggcgaggctgtaaactttgcaactggtgattggttcccaattggttcagttgctagccgtcgttatgcactgctgaacagggtgcctcttcttccccacgaggaacttctctgcaaagaagcaatgcttttgcgtatggatttggaacttcaaaatcaagcttattcctctgcagatttgatcacccaccatagcattaaagtttcttttgtaaatttgatgcggtttcaacatcgtgctaggtggtgcctcatgagatcaaaagcattttctggtgtatcgtcattttcacacggcactattctttgcagcatatgcaagcgtgactgctatgtagcatatctgaactgcaactgttactcacatgcaatgtgccttcgccatgatcctaggtctcttgatctaccttgtggaagcagtagaaccctttgcttaagggaagatttttcggacattgaaactgcagcaaggaagtttgagctggatgatgttgttttgcatgaaattgggcaatatagagaaagtgatgactacagtctccttttgaacatgtttccacgagctgaagaggaaggctatgttccattttgtgaaataaagtttgaatggtctgaggaaaccttgaaaactgaggactgggttgaacaggcctccaatgcttctgcatctagtattggaattgtgtcacgtgttggttctcccatggaccaaaaagattgcctttctgctaatgttgatgtacaggaaaatgctaactcaaacttagggaatagtgtatctgtcaggccttctagagacatttctggatgtgaaagtgaaagatcagttttttcacctggtgatgactatttaaaggttcatgaaaaagtagctcatgtttcagatgctagaactgttgtagatcaagacagtgatgagtctgatacagaaattttcagagtgaagagacgttctagaacagaacatgggaggaggagtacacatgattcaatatcagttaatgttgagcaccagggttacaaacgattaaagaaacatcaaactgaaggacggcttgggccattatcttcatcagactgttccatggctgatgatgcaactcatagttacaatggtaattcaatccattctaaggaagccttggattatcctttaagagacaaatcggccagaagtggtacagttcccatctctattaagtccaagaaaggggataatgcatcgagcaagcaaaacgagaataaaagagatgaaaatttcgactatgggttgggtaagactgtgggggaaccacctccgatagagatagggccaaagaggctgaaagtcaagacccttcaatttttaagtttggaggaagaattgaatagctcataa

SEQ ID NO: 255 - protein, 841 aa, Nicotiana tabacum
MSREAMLEFLKRKRLQRKKPESMNDSTYVSNTMSRSGGDALSSSASCGVRVHVNAGWGTSLNRRDVFSKHKVAKFDTSNLDWTDKIPECPVYYPSKEEFEDPLVYLQKIAPEASKYGICKIVSPIMASVPAGVVLMKEKAGFKFSTRVQPLRLAEWDTDDKVTFFMSGRNYTFRDFEKMANKLFTRRYCSAGCLPPAYMEKEFWHEIACGKTESVEYACDVDGSAFSSSPNDELGKCKWNMKRFSCLPKATLRLLEKAIPGVTEPMLYIGMLFSMFAWHVEDHYLYSINYHHCGAAKTWYGVPGHAALNFEKVVRQHVYNNDILNADGEDGAFDVLLQKTTLFPPNILSEHDVPVYKAVQKPGDFIVTFPRAYHAGFSHGFNCGEAVNFATGDWFPIGSVASRRYALLNRVPLLPHEELLCKEAMLLRMDLELQNQAYSSADLITHHSIKVSFVNLMRFQHRARWCLMRSKAFSGVSSFSHGTILCSICKRDCYVAYLNCNCYSHAMCLRHDPRSLDLPCGSSRTLCLREDFSDIETAARKFELDDVVLHEIGQYRESDDYSLLLNMFPRAEEEGYVPFCEIKFEWSEETLKTEDWVEQASNASASSIGIVSRVGSPMDQKDCLSANVDVQENANSNLGNSVSVRPSRDISGCESERSVFSPGDDYLKVHEKVAHVSDARTVVDQDSDESDTEIFRVKRRSRTEHGRRSTHDSISVNVEHQGYKRLKKHQTEGRLGPLSSSDCSMADDATHSYNGNSIHSKEALDYPLRDKSARSGTVPISIKSKKGDNASSKQNENKRDENFDYGLGKTVGEPPPIEIGPKRLKVKTLQFLSLEEELNSS

SEQ ID NO: 256 - DNA, 2851 bp, Nicotiana tabacum
gaattctagtattattttccctttctttgcttctgaggtagtttcaagtttaagctgatcttcaaggcagttttccaagtagaagttggttcatctaaggttattacacaactcttaacaattgtgtaatatccattataacaagatggccgcttctgctggagaaaactccaaggaaaggtgaaatttttggttctcgttttcgcttatattttaagggacggcttgtattttgaccaagattttgatcttgctgtgatgttgttgcaacatttccattgattgctatgtgaatgagagctgaaatttcattcccttgctgcagggttgcaatcattttctcctagtgaccattttgaaattcttcatttatattttatttatctgtccatatcacacgtcttggaagttttgagatgttgaatctgattgatgtatatgaaaaatgtaaaatgatcaattctttttcatcattcccacatagatttttcaaagcacttcctgttttttgttccattagttttggtcacatgttttctcccagatagtatctttgatgactttttcctgtatctggaaggaaaaaaaacaagtaggtaggcctaacttcaaacgataacaactctcaatacataacaaatgtgactacggataagatgtcgagtcttcagaggtttcattatagttggattttgctttttttgatcaatggagtatagctaattgctgctatattttgtcttaattagcagtgcttcctctctagcaaggcttgctccccttcaagcagtactatttgacattgatggaactttatgtgattctgatccatttcattatcttgcattctgtgaaatgcttctggaggtacattccaactattactagattttatttcctactgagaaagttttaactttgaatgtcattttgtgacgattttctttccatttgcaatttgtgttaatttcaacagataggctacaatgggggtgtgccagttgatgaggagtggtttgtcaagactatttctgggaaacacaatgacgatcttgtctctgtctttttccctaatgatcatgaaaggggtgtaaaattcttagatgacaaggaagctttgtttagaaggtatttaacttccttaccataccttgtctttttcaatgagtttgtttagttgtatgaacttctagtgtaaaaaaataattacataatcaggtcacttataaaataattacaattaaatctttatgataaccattaactcgtaacctgcttcaatatattaaatcacattgatcgtgtaaaaaatcggatccttcctatgtgaaagtacagagaaaaatgacatcgataaaaattgataagttaaaattgccaattattcatcaaaaggagaagcggccctattgaagttagaattaataatccttgataccttaactaatgcatgaaaggatccttgaatagcggtagggtaacctcaaaatatatcaaagacttctataatgcttactatttttcaatagaaataattcgttcaagaagggctccgaaagatgtcgatcatatatgagaagattggttcttcagtgtatttaacttaaatcccgtttcaattagtgttatgcaacttaactataagttcaatatcattaatccaccaatctcatagctattgtgggtggaaactataggttggcaaaagaacaattgaaacctctaaatggtctctacaagttgagaaagtggattgaagatcgtggtctgaaacgagctgcagttaccaatgcacctagagaaaatgctgaactgtgtataaatcagcttggccttgctgatttctttgatgcactgattcttggaagtgactgcaaacatgcaaaaccatatcctgatccctatttgaaggcccttgaagtgttgaatgtatcaaaagatcacacatttgtatttgaggtatgatttcttttgactttcagtttttcttatcagtattcatcaaagtcatttcatggacaatcatccaactttctctttgtcgcaccaaactcatagaactaatttatataatatagaaataactcattatgtttgtatattatagaaaataaaaatgccagaaaatgctaaatttggtcccaaaaacataagtaggtcgtctcttcagcaactatccatgcggcaccactaaaaaaattaaaaacccaatttccgacccaatctttttaaagaaaaaactaatgatcacgtcacatggcgacagacatcggacgttattaggttcagaaagtgagtctttttcttttaagtggtgacatgaatagtgtgtaaggtgagtcaatgacgtgactatacctacatggcaattttatacatttatcaataaacttgtgttttttggcatttgattaagcattccggcacttattgttttttctgctatataagcatagttgagttatgtttcctattataaaaattagtttcataacaatagtataatagattgaaggtttgttgggcatcccttaaattaacctcagtttcatcttaatgaaacttattgtatgtttgttccatgggtaggattctgtctcaggaataaaggctggggtggcagctgaaatgtctgttgttggcttggcaaatcgaaatccatctcagttacttatggaagcaaatcctacttttcttattaaagattatgaagatccaaaattatgggcagctcttgaagagattgataagatgtcccgtactgaaaagaagaccatagcatgaggctataaggcatagacaatatataagaggtgaaagatcggcaaagaacttactcgaatttcatatt

SEQ ID NO: 257 - DNA, 762 bp, Nicotiana tabacum
atggccgcttctgctggagaaaactccaaggaaagcagtgcttcctctctagcaaggcttgctccccttcaagcagtactatttgacattgatggaactttatgtgattctgatccatttcattatcttgcattctgtgaaatgcttctggagataggctacaatgggggtgtgccagttgatgaggagtggtttgtcaagactatttctgggaaacacaatgacgatcttgtctctgtctttttccctaatgatcatgaaaggggtgtaaaattcttagatgacaaggaagctttgtttagaaggttggcaaaagaacaattgaaacctctaaatggtctctacaagttgagaaagtggattgaagatcgtggtctgaaacgagctgcagttaccaatgcacctagagaaaatgctgaactgtgtataaatcagcttggccttgctgatttctttgatgcactgattcttggaagtgactgcaaacatgcaaaaccatatcctgatccctatttgaaggcccttgaagtgttgaatgtatcaaaagatcacacatttgtatttgaggattctgtctcaggaataaaggctggggtggcagctgaaatgtctgttgttggcttggcaaatcgaaatccatctcagttacttatggaagcaaatcctacttttcttattaaagattatgaagatccaaaattatgggcagctcttgaagagattgataagatgtcccgtactgaaaagaagaccatagcatga

SEQ ID NO: 258 - protein, 253 aa, Nicotiana tabacum
MAASAGENSKESSASSLARLAPLQAVLFDIDGTLCDSDPFHYLAFCEMLLEIGYNGGVPVDEEWFVKTISGKHNDDLVSVFFPNDHERGVKFLDDKEALFRRLAKEQLKPLNGLYKLRKWIEDRGLKRAAVTNAPRENAELCINQLGLADFFDALILGSDCKHAKPYPDPYLKALEVLNVSKDHTFVFEDSVSGIKAGVAAEMSVVGLANRNPSQLLMEANPTFLIKDYEDPKLWAALEEIDKMSRTEKKTIA

SEQ ID NO: 259 - DNA, 6697 bp, Nicotiana tabacum
agaatattcatcatatctttctctctcctctctctctcttcttcgcccttttcaccgaaccctaactttcccctttccaaaccctaattccgaacacactaaaagtctcacttcgaaatcgaaaacttcagcctacattgaattcatatctacgattattttgattatacgatgaatactcagccgaacaatctctacgatacggcgtcgcagccggacaccgggaacgatgcatacacattcctcgaattcaacacgcagggcgaagaattcgattatcctgaatttcaagagctttcacagccaattcgatcgtcagcgtggcctacgccgtcggattctctggtttccgaagcacccgatcggcctccgtcttctgacgcctctccgtcaaaaaaatcccgcggtggaaacggcggaaatggctctggtggtggcgggaacggaaatgttattggtagtagtagtaataatcaggcggcatcggtggtggtggatgcgttggcggcggggatgagcggattgaattttgaggagacggtggatgatgagggttttgagtacggaaagggggattttggtgttgagcatgcttgtaagtactgtggagtgacgaatcctgcttgtgtagttaggtgcaatgtgccgtcttgccgtaagtggttttgtaattcaagggggaatacttcgggctcacatattgttaatcacctggtatgtaagagagatgcatttttttctcacgcacatttgattcttgttgtgaatgcctgtttttcgtggtctatagaaatgtgcagaatagatgttatcatacaacaacaacaataactatgtcaatcccaaacaagttggggttggttctataaatccttacagaatatgttactcatataaactcattgccaatatcgtacaaaataaaaataaaaggacaagaagtttatatttcctattgacatataaatatctgcaaataaatttatcgtgcaacaattatgccccagtcttagacaagttgtggtctgttatatgaatccttattaaccatgtcattccatattcatatgaacccagtattatacaaaataaatataaaaagtactacgtactagaagttcattatcttgttgacttataaatctctacaaaataggttgtaccataaaacaacaactatgcctcaatatcaaacaagttggtgccaattttcactgatcatattactcctataaacttatctcaggccaatattatacaaaataaatttaaaaagtactagtagtttttatatattaaaaggtaagaatgtaccaccaacaacctttaggtgttttgtttgataagaatgtgccaccaaaataagttctatagagcgataagggatgagtgttggcttatcaagaattcacatgtctaaaagatgaaggtagtagaaatgaggatgttgagatggatatatggacataccaggattgataaaattaagaatgaagatattcgggacaagatgggtgtggcccctgcggaggacaagatgagatacgcgagacttggatgattcaggcatgtgaagattagaggcaccgatgctcgagtgaggaagtgaagaggtgtgagatgttggccttgcagggtctaagaagaagtagaggtagaggtaggctgaaatagtattggggaaaggtgattaagcatgacatagcgatgctccagcttatcgaggacatgacccttgataggaaggtatgaaagtcgagaattagggttaggtagcatagcattttccttgttcattccagaagtattagtttactacttaggggtcgtttagtatgaggcataagaaggtatagtgctggtataaaaatttaataccaccttaatatttcgtttggttagcaaaccaggtataagttatcccaggattaaaattaacaccgggataacttataccttatagagggtggggtaattagcaccggtataacttatacattcttcttacaaattatgcaattgtcatatttaatacaacatacctaacaatggataaaaaacaatcccaacataactaatcccagcataacttatcctagcataacttataccagtataacttatcccggcataagccgtattcaaaccaaacgaccccttagtgttagtctagtatttttttattcttagatttctattattacttgttgtctctttcgcttcggttttcttattggttgttggtgtcattgcttattgttactccttcctttttatctttcctgagccaagggtctaccgcaaaagcctctctaccttctcaaggtaggagtaaggtctgcgtataccctaccctccccagaccccacttgtggggttatactgggtttgttgttgttgtacgatttttttatatttcttatgaatgtgtaaatgtctgcagaataggtttatcataactacattattttttgacaagtagcttactagctttatcataattaaataaaaaaacgtgcatagtagctttatggtattttcttttgtagtttatttggatgacttgaagttgatttacaagttataatttggatgaaaaatagtttttctgtcctcattttgctaaaggaagtagggttttaagtggaataccttatacctcacacccattactcccctgaacttaatataggtatatatatttcaagctaaaggcagtagtgtgcagcactagctgcagatagggtcttggggcaggggcgtgtttctcataatgtatttagtctccttcctcctgtcctccctttctctctggagcttgtttcagtgttgttaaaggtgcgcttaagccctgaagcgaggctcaaaacatgttgagagcttcgcctcgctttgtgagcgctttagtgtcgcatcaagggtctaagacatacttttccttgccaatgagtgtaatcctaaaaaggtgactctagacaacttatatttcactttatcttaattttttttcaatttctttgtccatatatttgttattcatgcttataattattggttttggactacatatacatatttttacttattctccaattgcaccttttttcattaaagctcacactttatttgcgctttgcgcttaaagtcctaacgaactttagagcttttttgcgcttttcgcttttgataacactggcttgttttaggaaagggaataacatggttaaaaaaggagaagtatggaaccagaaatactagtatcagatagcaccagaaaagtgaactagggaagtagatgaagcttatgcatttgtctttgacctagcgattattacacgactaaccaattagtctttattccttttaaattctttaaatcaagcttattggtaactgctgagagaatctccttccatttttcttgtttgtgtgttatcaataaggtttttagccgagtatagttcttttgtttcatctggtgatggatggtcaatggtgtggatgttgttggtttttgagctctcttttatttgcttttcccccatatttgggatgctattgcccccatggctttactcttaacataaaatgcaacatgtgatgcatgggttaggcacttcatgggttcgagacctaccacagccaaaagcgtgagtttaagcggaggagtatagaggggcaggcccattatccaccgtttttgaagcatgcgctactgaccctcgagtgtttcctggtcattaaaaaaaatcgggatgctaatcttcataaaaaaaaatggggatgctattactcatgcagcttctagctgttatgccacgggaaatagatttgctgttatgccatgggatatagatttgctgcgtccgtttattctttgggaaagcatatttttgaagcaagaatggaaaatttatttgatacaaatgtatagttttgtcagcctttttctgtagtatggtgaatgtacatttactaggtataatgctagattttcgcaggtccttataagttagtaaaccaacaagttcttttctctttttgtagtgtatatttccagcaccctttagtgctgggatctcttcaataaaaaagatcttttatcccaataaaagtacgtttttgtcagattcatgcaactttcacctccactgaattcttcatttatgcatgtgggataagttaaaaaggagcttctctatatgtttttcaaggagaaaagccaaagcaccaccttttcttagttactaagggagtagattatctctagttgatactgcattttggaatgtcagttgtccaaactgtagaaataaataaggaatcttaaatgcatattataattttttcaccagtctaggcagtgggatcagccacttgcatttaatggacttacgttggggtgttatattcatctcgccttttctacaactggcatgtctattatattctctccggaaacaaggcatttatggcgtataatttttgtattgttggcatttattgaatattgtcaattttttctaataggtgcgagcaaaacacaaggaggtgtgccttcataaagatagtccacttggagaaacgattctagagtgctacaattgtggatgccgaaatgtctttcttcttggtttcatttctgctaaggcagagagtgttgttgttctcctctgtagggaaccttgtcttagtgttaatgcattgaaggatatgaactgggacctaagccagtggtgcccgctcattgatgacaggtgctttttgcagtggcttgttaaggtctggattctctttcttgttctctctctttgatccttttggtttttgttttctgtcctgtatttgttacgtgtggagtgctgcaggtcccctctgagcaagaacagttgagggcgcgccagatcagcgctcaacaaatcaacaaagtagaagaattgtggaagactaatccagatgctaccctggaagatcttgagaagcctggtgtagatgatgagcctcagcccgttgccttgaagtatgaagatgcctatcaggttctcactggatgatgctattgtattatctcctctgccttttatgtgtaataaatgctgtgcaggaattgctttactatgtattgacattttaactaagtttgccttcacccttctaatgtagtatcaaaacatatttgcaccattgatcaagctcgaagctgactacgataaggtatgtcaggttttgaagatgattttacatgctgaagcgtgagtgcgtcaatgaatactgtactattcttagctttttattacatcctgaaatttcatgtattttcctctaactttacatgttccttttcacctttgcttttggatagtgagcatactacttacccaagtttacttgatagagagttttgttcatacaagtgttgattttatgacaattgcatttacgcttgttcgtctttttcttcttgattcttaacgattgtgacagtggagctaagacatgcgaagttactttcctctgttgtcactcttgagtaaatatgtgagcgcacaacttacctaagtttacttgatagtgaattttgtcatacaaatgttgattttatgaggacaattgtatttatgcttgcttatctttttcttcttgattcttaatgtccgtgacaattgagttaagacattcgaagttacttctctctgttgtcactcttgagtaaagatgggagcgtactacttacctaagtttacttgatactgagttttgtctctacaaatgttgatttatgctgaatattgcatttaagcttgcttgtctttttcttcttcattcttaacctctgtgacaattgagctaagacatgtgaagttacttctctctgttgtcattctttttctgagattgtgatgttttcccttgtcaattaatcttcccatcgtgtcttcttcgtctccaagtagagtttatacttgggttgagatactgcttacaagtttttgagttcttttttctgtttggtagatgatgaaagagtctcagagtaaagacaatcttactattcgatgggatattggtctcaacaagaaacgcgttgcgtactttgtcttccctaaggtattttcttgttatttttcctgctatgattcttctagattctcagactgttatagagcttattgctgtcatttactattaaatcttgatatgggaaatctcttgtgtctttccctatctgaattgaagatggtctgctgttttttaggaagataatgagttgcgtcttgtacctggtgatgagctaaggctgcgatattcaggggatgcagcacatccagcttggcaatccgtggggcacgtggtatgggcattttgcttgatctccaactcttttgagagggaaaataatttatggagtaaacaagtaaattggttggaatgaaaaaggctcccagaatcatggaaaattttctttaattcttagaagagcttctcggaaagctccctgcttcttgttttcttggttgttaagggcactttttgcaatttctagcctgagatattgattgactattcaattttcaggtaaaattaactgctcaagaggaggttgcgcttgaacttcgtgtcagccaggtaccttagtttttagattgctagtctcttctcgattttctgttttcttctttcaccatgttttgcttgt

SEQ ID NO: 260 - DNA, 1266 bp, Nicotiana tabacum
atgaatactcagccgaacaatctctacgatacggcgtcgcagccggacaccgggaacgatgcatacacattcctcgaattcaacacgcagggcgaagaattcgattatcctgaatttcaagagctttcacagccaattcgatcgtcagcgtggcctacgccgtcggattctctggtttccgaagcacccgatcggcctccgtcttctgacgcctctccgtcaaaaaaatcccgcggtggaaacggcggaaatggctctggtggtggcgggaacggaaatgttattggtagtagtagtaataatcaggcggcatcggtggtggtggatgcgttggcggcggggatgagcggattgaattttgaggagacggtggatgatgagggttttgagtacggaaagggggattttggtgttgagcatgcttgtaagtactgtggagtgacgaatcctgcttgtgtagttaggtgcaatgtgccgtcttgccgtaagtggttttgtaattcaagggggaatacttcgggctcacatattgttaatcacctggtgcgagcaaaacacaaggaggtgtgccttcataaagatagtccacttggagaaacgattctagagtgctacaattgtggatgccgaaatgtctttcttcttggtttcatttctgctaaggcagagagtgttgttgttctcctctgtagggaaccttgtcttagtgttaatgcattgaaggatatgaactgggacctaagccagtggtgcccgctcattgatgacaggtgctttttgcagtggcttgttaaggtcccctctgagcaagaacagttgagggcgcgccagatcagcgctcaacaaatcaacaaagtagaagaattgtggaagactaatccagatgctaccctggaagatcttgagaagcctggtgtagatgatgagcctcagcccgttgccttgaagtatgaagatgcctatcagtatcaaaacatatttgcaccattgatcaagctcgaagctgactacgataagatgatgaaagagtctcagagtaaagacaatcttactattcgatgggatattggtctcaacaagaaacgcgttgcgtactttgtcttccctaaggaagataatgagttgcgtcttgtacctggtgatgagctaaggctgcgatattcaggggatgcagcacatccagcttggcaatccgtggggcacgtggtaaaattaactgctcaagaggaggttgcgcttgaacttcgtgtcagccaggtaccttag

SEQ ID NO: 261 - protein, 421 aa, Nicotiana tabacum
MNTQPNNLYDTASQPDTGNDAYTFLEFNTQGEEFDYPEFQELSQPIRSSAWPTPSDSLVSEAPDRPPSSDASPSKKSRGGNGGNGSGGGGNGNVIGSSSNNQAASVVVDALAAGMSGLNFEETVDDEGFEYGKGDFGVEHACKYCGVTNPACVVRCNVPSCRKWFCNSRGNTSGSHIVNHLVRAKHKEVCLHKDSPLGETILECYNCGCRNVFLLGFISAKAESVVVLLCREPCLSVNALKDMNWDLSQWCPLIDDRCFLQWLVKVPSEQEQLRARQISAQQINKVEELWKTNPDATLEDLEKPGVDDEPQPVALKYEDAYQYQNIFAPLIKLEADYDKMMKESQSKDNLTIRWDIGLNKKRVAYFVFPKEDNELRLVPGDELRLRYSGDAAHPAWQSVGHVVKLTAQEEVALELRVSQVP

SEQ ID NO: 262 - DNA, 8426 bp, Nicotiana tabacum
aatatttaccatcacctgttaggtcatgaagtgagatgcagatggtccgcaatgcacttcctcgccgttttggtgcccctggtcttccagagcttaatgcatctcaggttgagggcgctatctgtttgcttgaacctgttgcctcttttccctcatttctaaaaaagcatatttcctttagcttcaatattgatcacgcttccaaacctttttcaggatacctttgaacgggattttttgacaatgaaaattgttagtagttcactaagcatacacatgtagtatcaaacatgttatgatggcaagttgcttacatttgagaattatagtgaataatcaaccctgattgctgtgttggtacatgttacattgtggaacccctattaacaagcacatgcataccaaattttagttgctgttttgttctctcttttcataaaattgccccctcaatttcggcagcttacttaattaagcttaatgcagaagtggtgccccatagtcagttgtttcccctcacccccttaaccaaaaaaatacccctccaccaccaacagtggaaggaggttctcaaaaggagttattgattctggttgtcttattgatccatgtttgctctcttaggtttttgctgtaaaaagtgttcttcaaaagcccatcagtttaattcaaggtccacctggaacgggaaaaactgtcacctctgccgccattgtgtatcatatggccaaacaaggccaaggacaggtaactttaagtcatttttacttatatttgctctaggtattagttgcttgatataatggctctttacaatcatttgctgactattatttcatcaggttttggtctgtgcccccagtaatgttgctgtggatcaattagcagagaagataagtgctactggtctgaaggtgaggcaccagctatttctgtatctccttcccaccctccaacccaagaaaaataaagtgatgaagattgaagacattttgaactgactgggaaatcactattttggtgtttaatgcatatttatgcagcacgtgtttctagtggaagcatcttgcagaatgttggacttttgtccacctacctttgacatagtatatatatctccatcccctatcagctccttttatggtaatgatttaaagaaagagttctatttatatcctcagatggatatggttaactgaaggacaaaaatgaatcttttttgataagattttttttttgataagaaggacaaaaaatgaatctcccatatccatcccaatcggccatgtcccaccagtggaagatgtaagttagatattactaggttcaaccgaacctactattttgacaggagcataaatatctatacataaaaatcactaaaatttacttcttaaccatgatttgaaatattttttgataagatttttatttttgataagttttcgatttttttggataagaaggacaaaaaatgaatctcttatatccatcccaatcggccctgttccaccagtggtagatgtaagttagatgttactaggttcaaccgaacctactattttgacaggagcataaatatctatacgtaaaaatcactaaaatttacttcttaaccataatttgaaatatgcaatgtgttcagtgccaaaaatcttataggtcgaacccattgaggtttaattctggatctcagtccaacccatgaatacaaactgaaggcgaaggacattggagtctaaaagtactggaaatataataagaaatgtaataaaaatgatcagaaaattccaactacctctttttatttttttattttttttatttatatatatatatatatatatataattaaatttatgagaatgttaggtccttcctcatataattttcttttctccaggtggtcaggctctgtgccaagtcaagggaagctgtcagttctcctgtcgagcatttaacccttcactatcaggttagttttttaatttcttatcctcaaatatatatatatatatatatatatatatatatataatatatatattatatatatatatatatatatatatatatatatatatatttaacccttcactagcgttccatttttagtgatatcttgcaaacttttgtttatacaggttcgccatcttgacacgtctgagaagagtgaactgtacaagttacagcaactgaaggatgaacaaggtttgtgtttctttcctggattctctttggcctcatatatattggggggatttagcatttacatggtgatacttttagcgtagtgctcggtttttttccctctttctcattatatatatcctttattagagcattctaaatatgtgcacgtgattcagagtcatttggttaatgaactttcaggagaactctccagcagtgatgagaagaagtataaagctttgaagcgggcaacagagagggaaatagctcagagtgctgatgtaatttgttgcacatgcgttggtgctggagaccctagattggctaacttcagattccgccaggttggttcaccttattactgaagattttgaggatttcccaagtattttagattttcactttcttattttcgttcttatgtactcattctggattcttgctgattttaacatttctgttgtgttaaacctcttggtaggtgcttattgatgaatccactcaggctactgagcctgaatgtcttattcctttggttcttggcgcaaagcaggtcaccattacaattaatgtcatgttgaaattcatttatgaaaaaatgtcatactgaaatatagtacgatgttgggtcttactgtgagttttgtgctaggctgttcttgtcggagatcattgccagcttggaccagtcattatgtgcaagaaagcggcccgtgctggacttgctcaatctctatttgagcgccttgtgtttctaggagtgaagccaattaggttacaggtgattgcctgtctgttgatgtgttaacatttcatcggggttggtagtggctgaagttaaatataagattctcttttttcagttattctcttgtttctcatatagttggcatagtgattggaagtgctcttcagtcatctatgaagacttgaggagtctgctttgcattttggggtggggtggggggggggggtggagtaagatgttcctggtattttaactcttcttcaataatctaccacttccccataccttttatttgggcggagctgcaagaatcatgctagggttttctgatttttctatgcttcatgtagcattgtggtgttcggttatgtcattatctatctgagctgttttgagtttctaagcttctcattctagctgcttttatttgcttgccaagcaataattgttaatcccctcttgctcgtatttttttttttttcgttttgtttccttggacgtagagttgcctggtcacttcctctttcagagtactgtttatctttatttggctatttcttaagtctgtaaagcatcagaattcttctattccattactaatcttgattatgctgtctatttgtttgcaattccaggtacaataccgtatgcatcctgcattatctgagtttccatcaaatagcttttatgaaggtacactccaaaatggtgtaaccatcaatgaaaggcaatcaacaggcattgatttcccttggcctgtgcccaaccgtcccatgttcttctatgttcaggtattatcagattatgttagctgattcttctttgtttttcgttttttgagttgtggaaaaatctgtcattttcgttttgggatgttattgtgatggttatggatatagtaaagattgtttctcctatatagtttataggaattttttcctggtttactgatatattcaaatttgaatacttggtaattcatctatagatgggacaagaggagatcagtgctagtggaacttcctatctgaatagaactgaagctgcaaatgtggagaagattgtgactacatttctaaagagtggtgtagtccctagtcaggtaaattcttatatgcatctttaaggttgaacaccttctttttgtggcgaggatgtaattattttatattcacagattggggtcataacaccatatgagggtcaacgagcttacattgtaaattacatggcaagaaatggttccttgagacaacaactttacaaggaaattgaggtaggcattaaatagatgagctttatgcttttcttggattcttaatacttactgtgagtatttgctatgttcaggttgcaagtgttgattcatttcaagggagggaaaaggattatattattttgtcttgtgtcaggagtaatgagcatcaggttggtttgcatatccattaattctctttttgatgcttcattttttaacatattctgatttgattcgatctgttgaagatttatgcatcctcctgtgaaccatacctctgttttccccccccccccccccccctcctctgatcctttttggagtctgtttaacttcatttgcaaaagtttcagttcttttttatttcggggtgcaggaggtcgggtggaatttttgttagtgttaagatatgtttttgcaataacttgcatgcttaatatatagtcagtgtggatctctgactctcttgtgcttaagctttaatctattccaccactcccatatttcactcttaaacttagtattgacttcttcttttacttctcttttctttttagggcattggattccttaatgatccacggaggcttaatgttgcccttacacgtgctcgttatggtattgttatacttggaaatcctaaagttcttagcaaacagcctctgtggaatggcttgttgacacactacaaggtaatttcttcaaaatattctcttgtaatgcttattaggcattatttcgcgatttctctacacttcggagaagttatgaactggcaaagttgacataatattaggtggttaattttttgggataatatatcacgttgaatttgttaggcaatattgttactgtctgcaggctggggacgtattgagtaatgtctcagtaggtgtttcatgctttgagatgctcatgctttaatgaatttgtttctcaggagcatgagtgcttggtagaaggtcctctgaataacttaaagcagagcatggttcaatttcagaagcccaaaaaggtacttattgtggtcaaatactcttccaaagttatatgtttgtgcttgtgcttgattatgcatcagtactcaggtttcttgtaacattgtttgcagatctacaatgagcgcagacttttctttggtggtggaccaggaattccaggtgacagttttggatctgcttcaggccccaatgctgacaggagaaatagtcgttctaggggtatggtggatctgaactttcccccactgactgttaattgcttgctgagatgttgtatgattggagctcgtgtctttcatctgataatgtgtcagaaaactgcttttgctttcttattgtacagtttttctcaaagaaactttggaataggagtgacaaaatggttaaaagaaaacagctaaccacccatattatccactaaaaaatgggttggataatgaactttttaaaaacgggtcagatatggataagaaccatattatccatttataaaatggttaaccaataggtaactaatggataaccaatgggtctaacttttacatttgtaaaacctcaaattgggggttcctcaagttagggagactaagaattctcccaaaagtgatcatatgcaagaagtcatggataatatggttacccatattatccgccggttaacccgttttttttatccgtattaaatatgggccgggttggataatttatccgtttttcattacccattttcgacctgacctatatccgccccgccccgccagtttgccactcctttggagtaactagaaaattttcattattattattataatctcatggaatttatatatgtatttgtctgcttttgctgaggatatgattttaagtgtaggttcttatatggcacctggtgtacccaacggtactcagaaacctggtgttcatcctgctggttatccaatgcctcgggttccctttccaccttaccatggaggccctccacaaccgtatgcaattcctactcgtggtgctgtccatgggcctgttggagctgttcctcatgttccacagccaggtagccggggttttggggctggacgtggcaatgccaatgcaccaattggtagtcatctccctcaccatcaaggcgcccagcaacaggctggaagtcttggatctaacttcaactttcctgcattggagaatccaaacagtcagccttctgttggaggacctttatctcagcctggatatgcttctaatgttagtaaatttcagtttgttttttcgatcaatagtaggtgatttgctgtaagcattttctctcttttgaattatagatgggtatccagggaccaggccagacatttcgggatggatattctatgggtagcatgtcacaggtgattgattctgaacatcaaaattgttattttgatttaatttttctatcatatttaccttagatttgttcatcaggatttcgtgggagatgatttcaagagccaggggtctcatgttccatataacgttgctgacttctctacacaggttcttgatcctgtgcacattttccagtaattgtatatggtacatgggcagctgcacgatcactgccctttttattgcataattatttgattttctcgctccaattagtttacataggcaaagcaatattaactggccttttttttttgttggtatttaggcttctcaaaagtggatatgctgttgattatgtaactcaaggagcacaggctggttttcacagggaacttcttaaaccagagtttcgcaatttctggatactcccgttttggttcaggaaataattcatgtcacaggttaattttaattgttcatctttggccccttaaatgtcatcaactttaaggcctgttgaaagcatgtatttaaatatgagagtctggaattttttcacaagttcatcattagctcttctgactgggtggcttttggtagacgagttaattgaagtggtctcttatgttttctttttctcttgatcttccggttggacttttgcttatccgggataatttatttctggggtgcacggactcatggctctggagtccaggtctctttactcaactggaatatatccatcacagatgaggtcacagaatcattttggcattccatgcacttcttcagttcaggttagtttattaaataattctgctttgagagttggctaaattatatgaacgcaacaaaataggaaatatggattaggcgaagtccaccctagattgcacaaatgattcttcacgggaatataatgccaggggacttcgcttgttagaaacatattttcttcttgctattagtttatttcaactagtctaatgtcacttggatgattgaggttttccttggaatagcacttgaatttgattccactttttccagagttcgcttaatccactttactcccaaccatttgctcactacaacacgcaaccatttaacatgcaaagccaacctcagcagcaagccccacaaggccagggcttccaaaatcagaaacttcactacaatagttgaagatcgcaggcttgtttatgtgatgggttatagtttgcttccagcaatttggttgatgctgtcaacacgtggaccatattatctgacctaagatgaggtaaagagtttgctaataattcaggtcaaatggtgacatatcccttgccagtgattctgaatgttgagtcagaggctggagtggtggaaggctctctgctcaagtaaaccatgcgcagcacaactggtgctgagaaaggaaaaataacccatgttatctttgtgaagttttacatattgtttgaagagaaagtaatactatttctccgggagagaaaggttacatggcatgctattggccggaagggtgggttattcaggacacggagcttgctacttgcgcattggaagtacaacattgtttgaagctgcgaccatatcttttgtacagtgtccaggcgaaagtcagctaaccctttcagctcttcctgacatgtaattaaactctttagtctttgtattacgtggataatgacgataattatcaatgtatttatgtttcagcacttgaggtattgggtatataaacatgcaggtattagtcatttgattaaactgggttgcttgtaatccagtatcattttttgtgtggatgtcttttgaagcgttttgcttggagtagtcaatggaaaatgga

SEQ ID NO: 263 - DNA, 2157 bp, Nicotiana tabacum
atgcagatggtccgcaatgcacttcctcgccgttttggtgcccctggtcttccagagcttaatgcatctcaggtttttgctgtaaaaagtgttcttcaaaagcccatcagtttaattcaaggtccacctggaacgggaaaaactgtcacctctgccgccattgtgtatcatatggccaaacaaggccaaggacaggttttggtctgtgcccccagtaatgttgctgtggatcaattagcagagaagataagtgctactggtctgaaggtggtcaggctctgtgccaagtcaagggaagctgtcagttctcctgtcgagcatttaacccttcactatcaggttcgccatcttgacacgtctgagaagagtgaactgtacaagttacagcaactgaaggatgaacaaggagaactctccagcagtgatgagaagaagtataaagctttgaagcgggcaacagagagggaaatagctcagagtgctgatgtaatttgttgcacatgcgttggtgctggagaccctagattggctaacttcagattccgccaggtgcttattgatgaatccactcaggctactgagcctgaatgtcttattcctttggttcttggcgcaaagcaggctgttcttgtcggagatcattgccagcttggaccagtcattatgtgcaagaaagcggcccgtgctggacttgctcaatctctatttgagcgccttgtgtttctaggagtgaagccaattaggttacaggtacaataccgtatgcatcctgcattatctgagtttccatcaaatagcttttatgaaggtacactccaaaatggtgtaaccatcaatgaaaggcaatcaacaggcattgatttcccttggcctgtgcccaaccgtcccatgttcttctatgttcagatgggacaagaggagatcagtgctagtggaacttcctatctgaatagaactgaagctgcaaatgtggagaagattgtgactacatttctaaagagtggtgtagtccctagtcagattggggtcataacaccatatgagggtcaacgagcttacattgtaaattacatggcaagaaatggttccttgagacaacaactttacaaggaaattgaggttgcaagtgttgattcatttcaagggagggaaaaggattatattattttgtcttgtgtcaggagtaatgagcatcagggcattggattccttaatgatccacggaggcttaatgttgcccttacacgtgctcgttatggtattgttatacttggaaatcctaaagttcttagcaaacagcctctgtggaatggcttgttgacacactacaaggagcatgagtgcttggtagaaggtcctctgaataacttaaagcagagcatggttcaatttcagaagcccaaaaagatctacaatgagcgcagacttttctttggtggtggaccaggaattccaggtgacagttttggatctgcttcaggccccaatgctgacaggagaaatagtcgttctaggggttcttatatggcacctggtgtacccaacggtactcagaaacctggtgttcatcctgctggttatccaatgcctcgggttccctttccaccttaccatggaggccctccacaaccgtatgcaattcctactcgtggtgctgtccatgggcctgttggagctgttcctcatgttccacagccaggtagccggggttttggggctggacgtggcaatgccaatgcaccaattggtagtcatctccctcaccatcaaggcgcccagcaacaggctggaagtcttggatctaacttcaactttcctgcattggagaatccaaacagtcagccttctgttggaggacctttatctcagcctggatatgcttctaatatgggtatccagggaccaggccagacatttcgggatggatattctatgggtagcatgtcacaggatttcgtgggagatgatttcaagagccaggggtctcatgttccatataacgttgctgacttctctacacagagttcgcttaatccactttactcccaaccatttgctcactacaacacgcaaccatttaacatgcaaagccaacctcagcagcaagccccacaaggccagggcttccaaaatcagaaacttcactacaatagttga

SEQ ID NO: 264 - protein, 718 aa, Nicotiana tabacum
MQMVRNALPRRFGAPGLPELNASQVFAVKSVLQKPISLIQGPPGTGKTVTSAAIVYHMAKQGQGQVLVCAPSNVAVDQLAEKISATGLKVVRLCAKSREAVSSPVEHLTLHYQVRHLDTSEKSELYKLQQLKDEQGELSSSDEKKYKALKRATEREIAQSADVICCTCVGAGDPRLANFRFRQVLIDESTQATEPECLIPLVLGAKQAVLVGDHCQLGPVIMCKKAARAGLAQSLFERLVFLGVKPIRLQVQYRMHPALSEFPSNSFYEGTLQNGVTINERQSTGIDFPWPVPNRPMFFYVQMGQEEISASGTSYLNRTEAANVEKIVTTFLKSGVVPSQIGVITPYEGQRAYIVNYMARNGSLRQQLYKEIEVASVDSFQGREKDYIILSCVRSNEHQGIGFLNDPRRLNVALTRARYGIVILGNPKVLSKQPLWNGLLTHYKEHECLVEGPLNNLKQSMVQFQKPKKIYNERRLFFGGGPGIPGDSFGSASGPNADRRNSRSRGSYMAPGVPNGTQKPGVHPAGYPMPRVPFPPYHGGPPQPYAIPTRGAVHGPVGAVPHVPQPGSRGFGAGRGNANAPIGSHLPHHQGAQQQAGSLGSNFNFPALENPNSQPSVGGPLSQPGYASNMGIQGPGQTFRDGYSMGSMSQDFVGDDFKSQGSHVPYNVADFSTQSSLNPLYSQPFAHYNTQPFNMQSQPQQQAPQGQGFQNQKLHYNS

SEQ ID NO: 265 - DNA, 2611 bp, Nicotiana tabacum
cgaaacacgagtccctcaccgtctgaagaaaagccaaaaccaaaccacgcaaaaaagaagagaaagaattaagcaaagaagaagaacaagaaagaaaaaaacaaggggttgcccctctctttctctctttggactgattccttccattcccatctctctctttcatatattctttcagaaaaaagcatatagcatagcatccaagacaattgaggcaagcaaaccaatagaaagcaaagtttttgaagaaaagaaaaaagaaaaagttttaggtataaacaaattgtttgatggtgctcttggtaatagtggttgtgtcctcttctttgagagtggtgcacggttcgaaactgtttgatatttttctctaaattgattttgaagggtcgttgaagacatagacggatccatgatttaatgtttatggattcctgcaacaatctcgagtaaattttcaatagtagttgggttctcattcaaatatttatagacatttagtaaatttttcgaatacatttacactgtttgaacaaaaattattggattcacgtaaactcgtaggcggcaaggtagattcacccattattgaaaaaactattataattcatggcatcttcttctatttcatgttgtttatgtgttagcctttattattagctctttccccttctctctctttctcttttctctattctatccccaccaatcacacctcttcattgccaatttccacaaccataaacttatcttcatatattcattcaattctcatttttaaattcatggctgttcaagctcaatacccatcaaatgttctctttctaaacagaaatgtacaagaaggaaagagccaaattggcaacaattattcattacaacatcaacaaggtggaggttttggtgaatcatttcttgatccaacacaaatgctattcaatccaggaggtaaacatgacttcctttaatttctcttttgttgattcatcaattgtgtattagacacaaatttgaatgccacgtagaatagaccaacatggattttttctctaattattcacgccataagggtccattcgagaggaagcgttccctatcaggatttctttttttttaggatttgaactcgagacatctgattaaagagaaaaacagatcgtactttcaactaattgattattgattgatattcaaggcaaaaaggaactgatgttatctctgtttttgcaatgccagttggggcgaattcgcgaaagagaggaagagaacatacctcacctactacaactgcagcattgaatccattaatctcaatgcaatctcagccgcagctcattgatctaactcagcttcacacaccgcagcagcagcagcaacaacaacaacaaacaaatattgtatctacaggtcttcgtttagctttcgaagatcaatcgcatcaacagcgacaactatactctgtttctcctcaatcctctcaatcatcaattttactaaaagaagatttggcttctcatttcaaacagcaacaagacgaaattgaacatttcctccgagaccaggtatgatcgaatacatataatgctttttattttaaaaaatatattaatccatataatccttagcatgttaaaaaaaattgcttttttcgtgcttagaatttgtcacttacaaattgctaaaagagcaattaactggtgatttaaatcaattttacaacaaatgatcgctttggaatatgtaatgtatgtatatgcggattacttaataaatcacatgatagtgtacatttttttaaaaatatttttgttaaatttttttatagggagaacaattgaggcttactttagaggagaaaaggaagcggcactatcatgcgctgttgggagcagcggaggaaacaatagcacgaaggttaagagaaaaggatacagaagtagagaaagcaacgagacgcaatgcggagctagaagcgcgtgctgtacaactgacagcggaggcgcgtgcgtggcaagcgaaggcacgtgagcaggaagtcactgcggcaacgctgcaagcacagctgcagcaggtggcaatgatgaacggcggaatcaaccttccagagagagatgacggcggcggaatttcctgctgcggagaggcggaggatgccgagtcagcgttcgttgacccggaccgggtcgttgagtcaactggaccgagttgcaagggctgtcgaaagcggttcgcttcggttgtgatgttgccgtgtagacatttgtgtctttgtacagaatgtgatgctgtggcccaatcttgcccactgtgtcgatccattagaagctcaagtgttgaagtctttcttttttagcaggcccaatttaggcccaccttttttcgtgtcaaatacacaaatagctctcaaagtggatggtctcgatttttagtacgcttgttccataggtaaaactttaagtttaacaaatattgtcctctcttgcttttgccccatggacaacacttttagcttttgaccttaaagttctgtccgtaaggtgagggtcaaaagttaaagaccacccccaaaaaatagcgcatatgtatgagacaaatagtaaaaaactgaatgata

SEQ ID NO: 266 - DNA, 1017 bp, Nicotiana tabacum
atggctgttcaagctcaatacccatcaaatgttctctttctaaacagaaatgtacaagaaggaaagagccaaattggcaacaattattcattacaacatcaacaaggtggaggttttggtgaatcatttcttgatccaacacaaatgctattcaatccaggagttggggcgaattcgcgaaagagaggaagagaacatacctcacctactacaactgcagcattgaatccattaatctcaatgcaatctcagccgcagctcattgatctaactcagcttcacacaccgcagcagcagcagcaacaacaacaacaaacaaatattgtatctacaggtcttcgtttagctttcgaagatcaatcgcatcaacagcgacaactatactctgtttctcctcaatcctctcaatcatcaattttactaaaagaagatttggcttctcatttcaaacagcaacaagacgaaattgaacatttcctccgagaccagggagaacaattgaggcttactttagaggagaaaaggaagcggcactatcatgcgctgttgggagcagcggaggaaacaatagcacgaaggttaagagaaaaggatacagaagtagagaaagcaacgagacgcaatgcggagctagaagcgcgtgctgtacaactgacagcggaggcgcgtgcgtggcaagcgaaggcacgtgagcaggaagtcactgcggcaacgctgcaagcacagctgcagcaggtggcaatgatgaacggcggaatcaaccttccagagagagatgacggcggcggaatttcctgctgcggagaggcggaggatgccgagtcagcgttcgttgacccggaccgggtcgttgagtcaactggaccgagttgcaagggctgtcgaaagcggttcgcttcggttgtgatgttgccgtgtagacatttgtgtctttgtacagaatgtgatgctgtggcccaatcttgcccactgtgtcgatccattagaagctcaagtgttgaagtctttcttttttag

SEQ ID NO: 267 - protein, 338 aa, Nicotiana tabacum
MAVQAQYPSNVLFLNRNVQEGKSQIGNNYSLQHQQGGGFGESFLDPTQMLFNPGVGANSRKRGREHTSPTTTAALNPLISMQSQPQLIDLTQLHTPQQQQQQQQQTNIVSTGLRLAFEDQSHQQRQLYSVSPQSSQSSILLKEDLASHFKQQQDEIEHFLRDQGEQLRLTLEEKRKRHYHALLGAAEETIARRLREKDTEVEKATRRNAELEARAVQLTAEARAWQAKAREQEVTAATLQAQLQQVAMMNGGINLPERDDGGGISCCGEAEDAESAFVDPDRVVESTGPSCKGCRKRFASVVMLPCRHLCLCTECDAVAQSCPLCRSIRSSSVEVFLF

SEQ ID NO: 268 - DNA, 4481 bp, Nicotiana tabacum
aaacctccaaaaggaatgctgacctgttttgaacttttacactttttttccttaatttcttaaataaaaactctcaaaatccctcttccatataccaatattgcatcccctttataaataaacatccaaaagcttcaccaattcctacatcttctattttcaaaaaaatacacacacacacacacacaaaatgtctttaacacttcattcttcaacttcttttatcaataaaaaagaaacaaaaaattcaagacatcatgatgatatctcaaacatgacttgctttgctcaaatcaagccatcattccatctcaaagcaaagaattccaaagaaattcaattctttgctcctaatatggaaggaagaaatataaacaatgaagaagaaggagagaaacttcatgtactaacaactagtactcatagcaataatagtagtaccacaaaggtaccagtttttgtgatgttaccacttgatactataaatattggagggaacttgaacaagccgagagcgatgaatgctagtttaatggcattaaaaagtgctggagttgaaggagtaatggtggattgttggtggggtttagttgaaaaagatggacctttgaaatataattgggatggatattatgaacttgtaaaaatggttcaagaacatggtttgaagcttcaagttgtcatgtcttttcatcaatgtggtggcaatgttggagactcttgcaggtattattataaggctcctttaaccatttttgttttatgcttgaaataaaagacagttcagtgtgaagtatctcgcgattatgcaaggtccggggagggccgcaccttaaagggtgtgatgtaggcagcctgctctgattccacggctcgaacttgtgacttatgcttgaaacctatgttactcaaactcttcaaaaatattgttgggtgcgtgggatcctccaaatttagtgcatttttggaggatccaacacgggtacaacaacacttttaaagaatctgagcaacatagcttgaaacaatatattattatttccctatctatctctctttttaccatgattcaaagcggattcaatcatgagtttgcaagttcggtagaacttaatatttcgaaattgaatgttatatatgtgtgttgaaaacaaatatacatagaggtagctagatatatatttcataacctattttctctactcagaacccacaatctctaaattctgaatcggccaactaccaacatctatttccggtaggcaccaataagctgcaatattataagaaaaatttcattctataaatgaacacatctattagatctttttttttttcaatgtatcaatcttctgctttgaaattgttgatagaattatatatatggccaaaaacatatcctacactattgcaacagcatccaaaatctcaagatttaaccttttatataatcttctctaattattcaaagcaggtagggtaagactgcgtataatagacataagtggttcagccccttccccggaccccacgcatagcgggaacttgctgcactaggctgttttttttttcttttatgattaagtaggaggaggattagtttctttttcaccattcagacttgagacaaaccaatatttatatatctaaaatatttctaattgatttttgcagtatccctctacctccatgggtacttgaagaaatcagcaaaaatcctgatcttgtttacacagacagatcaggcaggagaaatcctgagtacatttccttaggttgtgatttattacctgtaatcagaggaagaacaccaattcaagtatacactgaatttatgagaagtttcagagaaagattcaagaattatttgggagatgttatagtggtaagtcttttaactcttctatgtcacatatctaatgtcagtatattgacaaagcgtttaagttctatgcattgatcgtgtaaaaacaaaattacaatcagatatctcaaaaggtaattgcacgtccttccatataataaatattgattggccgaatagtataacggtatgggtaaatttagccggatagtataatggagtttaaatataaacaatatccgaaaatagaaggatatacttgacccgtgttcccataataacctattgtagttcggtgcactaagctcctgctatacataaggtctgggaagggctacaccacaagggtctattgtatacagtcttaagggcagctcagtgaactaagctcccgctatgcgcgaggtccggggaagggccgaaccataagagtttattgtatgcagccttaccctgtatttctataagaggctgtttccacagctcgaacccgtgacctcctagtcacatgacaacaactttacctgttacgccgaagctccctttcaacttgttgaattacactataatgcgaaaattctttatattatcaattgatataacttaaatccataaaaccaatatgttattaagatagggaaagaaattggtaaagaaaacaagtgaaagataaagatcaatgaattactttatgtcaatctcatatgatccactaaacttgttggtttaaacaaatccaaatgatggaccactaaaatttagagctatatttagaaagtcacaaatagggaccacaatattccaagctaaaacaaaagagaaacttctgaaattcaaattctctttttcttctacaggaaatacaagtgggaatgggtccttgtggggaactgagatatccatcttatccagaaagcaatggtacttggagatttcctggaattggagaatttcagtgctatgacaaggtaaccttttttcacatatgttgtttaaaatattaatgtatttacttgcatgagagatccaagatcacatgtactaagctcccgctatgtgcgaagtctgcggaagggtcggaccacaaaggtctattgtacgtagtcttaccctgcatttatgcaagaggtatttccacggctcgaacccgcgacctcgtggtcacatatcagcaactttaccagttatgccaaggctccctttcagtacctagaaacaatggcggagcaaaaaattcctgcgcgaagtagtacaattcttttgcgtggtagagagttgtagaagactctttgttaataaagtcactgcttaacaaagtggtctttgatatccgtctggccgtcttactaaggagttatgtatcggagtttacctgttttcccttatgataatgagggcagctcgaactaacgacgggattcaaaaaagtgcaagaatgtactacctacctaaagatatttttgagccgcctttgccgctacaataaaagtttttcttatgtcagagcgattcaacaatttatatatatatataaattatttcaccttgtttgtatgatatgattttctaacgaaagggattcaattgaaccttcggttcatgcatcttagcccctatatagaaatttacacagaatgaaacaaactaactaacctttttctttgttgaaatcaacagtacatgaaagcttcactagcagcagctgcagaagcaaagggaaagaatgactggggccggggcgggccccacgattcgggacaatacaatcagtttccagaggacactggatttttcaaaagggatggaacatggaacaatgaatatggacagtttttcctagaatggtattcagggaaattattggaacacggcgatagaatcctaggatcagcagaaggtatatttagaggaactggagctaaattatcaggaaaagtagctggaattcattggcattataacacaagatcacatgcagcagaattaacagcaggatactataatacaaggcatagagatggttatctacctatagcacgtatgttcgcgaaacatggtgtcgtgtttaactttacgtgtatggaaatgagagatggcgaacagccacagagtgcaaattgctcgccagaaggtttggttcgacaagtgaaaaaggcgactcaaattgctggaattgaactagccggagaaaacgcgctggaaaggtatgatggaggaggatatgcacaagttttggcaacaagtaaatcagagtctggaaatggattgagtgcatttacttacttgagattgaacaaacggttattcgaaccagagaattggcgaaatctcgttgaatttgtgaagaacatgtctgaaggaggtaaaacaagacttccagaatgtgacacaagcaggacagacctatatgttggatttgtcaaagagagtcatgccaaaaaaactgcagacgctgtagttgtgtaaagatactcgctcgcgccagggctttggttcagtggtaagagcaaaacgcttgatgtttggattaggcacacatcacgagtttgaactttgccaaggacaaaagcctgaaatttaagtggaaaaaggtagaggggtgggctgattatccacc

SEQ ID NO: 269 - DNA, 1647 bp, Nicotiana tabacum
atgtctttaacacttcattcttcaacttcttttatcaataaaaaagaaacaaaaaattcaagacatcatgatgatatctcaaacatgacttgctttgctcaaatcaagccatcattccatctcaaagcaaagaattccaaagaaattcaattctttgctcctaatatggaaggaagaaatataaacaatgaagaagaaggagagaaacttcatgtactaacaactagtactcatagcaataatagtagtaccacaaaggtaccagtttttgtgatgttaccacttgatactataaatattggagggaacttgaacaagccgagagcgatgaatgctagtttaatggcattaaaaagtgctggagttgaaggagtaatggtggattgttggtggggtttagttgaaaaagatggacctttgaaatataattgggatggatattatgaacttgtaaaaatggttcaagaacatggtttgaagcttcaagttgtcatgtcttttcatcaatgtggtggcaatgttggagactcttgcagtatccctctacctccatgggtacttgaagaaatcagcaaaaatcctgatcttgtttacacagacagatcaggcaggagaaatcctgagtacatttccttaggttgtgatttattacctgtaatcagaggaagaacaccaattcaagtatacactgaatttatgagaagtttcagagaaagattcaagaattatttgggagatgttatagtggaaatacaagtgggaatgggtccttgtggggaactgagatatccatcttatccagaaagcaatggtacttggagatttcctggaattggagaatttcagtgctatgacaagtacatgaaagcttcactagcagcagctgcagaagcaaagggaaagaatgactggggccggggcgggccccacgattcgggacaatacaatcagtttccagaggacactggatttttcaaaagggatggaacatggaacaatgaatatggacagtttttcctagaatggtattcagggaaattattggaacacggcgatagaatcctaggatcagcagaaggtatatttagaggaactggagctaaattatcaggaaaagtagctggaattcattggcattataacacaagatcacatgcagcagaattaacagcaggatactataatacaaggcatagagatggttatctacctatagcacgtatgttcgcgaaacatggtgtcgtgtttaactttacgtgtatggaaatgagagatggcgaacagccacagagtgcaaattgctcgccagaaggtttggttcgacaagtgaaaaaggcgactcaaattgctggaattgaactagccggagaaaacgcgctggaaaggtatgatggaggaggatatgcacaagttttggcaacaagtaaatcagagtctggaaatggattgagtgcatttacttacttgagattgaacaaacggttattcgaaccagagaattggcgaaatctcgttgaatttgtgaagaacatgtctgaaggaggtaaaacaagacttccagaatgtgacacaagcaggacagacctatatgttggatttgtcaaagagagtcatgccaaaaaaactgcagacgctgtagttgtgtaa

SEQ ID NO: 270 - protein, 548 aa, Nicotiana tabacum
MSLTLHSSTSFINKKETKNSRHHDDISNMTCFAQIKPSFHLKAKNSKEIQFFAPNMEGRNINNEEEGEKLHVLTTSTHSNNSSTTKVPVFVMLPLDTINIGGNLNKPRAMNASLMALKSAGVEGVMVDCWWGLVEKDGPLKYNWDGYYELVKMVQEHGLKLQVVMSFHQCGGNVGDSCSIPLPPWVLEEISKNPDLVYTDRSGRRNPEYISLGCDLLPVIRGRTPIQVYTEFMRSFRERFKNYLGDVIVEIQVGMGPCGELRYPSYPESNGTWRFPGIGEFQCYDKYMKASLAAAAEAKGKNDWGRGGPHDSGQYNQFPEDTGFFKRDGTWNNEYGQFFLEWYSGKLLEHGDRILGSAEGIFRGTGAKLSGKVAGIHWHYNTRSHAAELTAGYYNTRHRDGYLPIARMFAKHGVVFNFTCMEMRDGEQPQSANCSPEGLVRQVKKATQIAGIELAGENALERYDGGGYAQVLATSKSESGNGLSAFTYLRLNKRLFEPENWRNLVEFVKNMSEGGKTRLPECDTSRTDLYVGFVKESHAKKTADAVVV

SEQ ID NO: 271 - DNA, 2271 bp, Nicotiana tabacum
atggagcatctagggtttcgtttgctaacgcccttcattgacagctgctcctgcgcaggacatccatcaacggtcagcgaaaatggtatgcgtcgtttttctctgaattatgcatgattttaatttaaatgcaattgtatttacacatttccagctcaattgttttgccttttgttcattaatttgtttaaccggagattgatttctatttttctatattaaaattcgcatattcagaagtttttgtatagttctgcttgcgttaaatctagtcatttccttttgatggtgattacttttcaagtgttaaaggatctatctttctagttacttggaattgcagctgtttttatctcagatttgtgatgtaaagagttcgaaaaaattagtccaaaagcgtaggcggataatgagtttaagcagatctcccaatggtccgttccaatattgattgctacaccacacccttgggtgcaacacattgctcttttcctagaacaaattgctttaaaagggtgtctttactaaactaaaacattaatttttgcatgcatcgtgttctctaggctcacttggaaaacttttttgtgaaaaagaaaagtatcgtgtttgatggatttggagtgagtggtagaatattcctaatctagcaataatgttacttcctttgtcccaatatatgtgatagtgtttgactcggcacggagtttaagaaagaaagagagacttttgaaacataaaacaagccattaatatttgtgtgtgtgactataaatcatgtcactaagggtagaattgaaagtttatatgtagttatatcttttccagaaagagaatggtgtcgttctttttgggataaactaaaagggaattttgtcgcataaaatgggatagagggagtatgaggtactgatccactaagaggatggtattccattggactaggttgtgggcataacttttgtttatttcacaattgaaggaatacctagttgtagatgactttagatggtggcatggtgcagatgcgctgttcatttgatgttttttttacgagttataataatatactaatttttttctgcagactaagaggaccaagaaggctggaatagttgggaaatatggtgagttaatggtttcttcttaacaattttttccatttttcttggtccatgttagcctcttgtaaacagaaatgcacagatagagctatgttttactatgcacgaatatggttgatcagcttgcttcagtatatattttcaaaatgacttttatcttggcgagaatggcgagttaacctgcatttcagtaatccacaggttggccgtactctttaaaaaatgatgtgcaaataatttcctcgtactattgataatgctagaagttgtagcacacactttgtgtgcatattctctgtttgttgaagttggaactacttttgtgaattctttaaacttgagtttggtcctcagaattgtacttattggtagggctcagcttcgttttttttatctattttgatggagtaccattttccccttgttctgttccactggttatttgttatatgtataacataattcttatgttgactttgatttttgcatttatatggctttttcatattttggcattccttagaatgtgttctgttttgtgtctggcaaagttatgttcctaaatgtcttcctatgtgtttaggtacccgttatggtgccagtttgcgaaagcagattaagaaaatggaggttagccagcatagcaagtatttttgcgagttttgtggaaaggtatgggtttctcgctgctctaatttaaagagtttgtatgttaaaagcttggctctgaatatatactcgttactatgaacagtacgcagtgaagagaaaagcagtggggatttggggctgcaaagattgcggcaaagtcaaagcaggcggtgcttatacattgaagtaattcccttctctatatttgttttcaatttttcctgttttgtgcgaataactgattcatctttttttgtcaatagcactgcaagtgctgtgacagttaggagcacaatccgaagactgagggagcaaactgagagttagagcaatcatcagcctttccttctatctgcttatgatttgtctatgaaattttgaaatcagatccatttttcaattttaagaccattttaatgtttgtgaacactttcaacttagtcattagctactctttgggaaagtggattattctgatagtgttattgtttcaata

SEQ ID NO: 272 - DNA, 279 bp, Nicotiana tabacum
atgactaagaggaccaagaaggctggaatagttgggaaatatggtacccgttatggtgccagtttgcgaaagcagattaagaaaatggaggttagccagcatagcaagtatttttgcgagttttgtggaaagtacgcagtgaagagaaaagcagtggggatttggggctgcaaagattgcggcaaagtcaaagcaggcggtgcttatacattgaacactgcaagtgctgtgacagttaggagcacaatccgaagactgagggagcaaactgagagttag

SEQ ID NO: 273 - protein, 92 aa, Nicotiana tabacum
MTKRTKKAGIVGKYGTRYGASLRKQIKKMEVSQHSKYFCEFCGKYAVKRKAVGIWGCKDCGKVKAGGAYTLNTASAVTVRSTIRRLREQTES

SEQ ID NO: 274 - DNA, 5563 bp, Nicotiana tabacum
gtggaggtcacatatctcactacttatgcatgtcaatatagttcatatgtatatcatttggtttgtattgaaagaagcatctgaatttccattctttctttggttttggggcaaaaaaattgtttttttggaaagtttagactttcttggagatggtgtaggaaaatcttgatcctttgttcttgctgtacctcatcaagattataggtacttttttttttgtctgattttggttgtaatgtgaactttttcttgtgttttggactgaaaaatgcaatcttttaatcaaataaaaagatggatggcttgagaaactgaggaagaggaagagggttgggtctatgttgctcggactctaaaatactccaaaaatattgcatttatgaaggatccggcgggggtacagtattatttttggagagtttgagaaataaagggttgggtcataattttttttaattgtcctattggaaacagcctcttgcagaaatgcaatacgatagacccttgtagtccgatcctttccgcatagcgagagcttagtgcatgggcttccctttccattcgaagatttttctttgttttgtccctttccagctcttttttcatgctgtttcaaatggaactgttgtgtgtgaaatctagagtacatgagtctctatatatatagctagctaaacttgtctgtttacttcattgcctttgtgcagattcaggttcttgtgaaatcttgttgcagaaattatagcaaaatggctggaagatccttcaaaccttcagactcacagcaagctaagcctccgggtgtgacctttgcgaggagaacttcatcgggccgatatgtgaacttatctagggactccctggatagtgagattagcgctcttgagtttgcgaactatacagtgcatatgcctccgacacctgataatcaaccttttgatccttccatttcacggagggttgaagaacagtacgtgtcgaattccttgtttagtggtggttataacagtgcgactcgtgcacatatgatggataaggtgattgactcggaaaccaatcatcctcagatggctggtactaaagggtcatcttgcgctatacaaggttgtgatggaaaagtcatgagtgatgggaggggtgaagatattcttccttgcgaatgtgattttaaaatttgccaagattgttatgttgatgctgtgaaaactggtgacgggatttgtcccggttgtaaagagccatacaagaacactgatttgactgaaaatgatgttgatccctctagacaacctttgtctttaccttcaaatgttgggatgtctaaaatggataggaggttgtcagtgatgagatcagctaataagtcagcccttgtaaggagcgagtcggggttgatgaggagtcataccggggattttgatcataatagatggttatttgagacgaaaggaacatatggatatgggaatgctatatggccacaggatgagggatttggaaatgagaaagatgatgacattggtgagcattctgaacttctcaacaagccgtggaggccacttacacgtaagctgaacatacctgctgcagttctcagcccataccggtaatttctagttccaagtagtttcaacaactatttatttgtcttctctgctacatgtattttaagcactaatattgaatgaatgactttaatcgaattgcatagtgctttattcttttaacttgtttggctctgctctctgatgtttcactattgcgccttcactcaatgactaaagctaaacgtaccaatatttccttctagtatgctttgatcaatctagaataacttgtagggggacttcatcatatacgttgtcaacttttgttaatgtgcttaccccttaccgtgtttgaaagacatgatccaattatttttccgttgttgaatacatttgaatactcctatgttgtaggttgacatagccagtggcggaaccaccttgtgctaaggggtcctactgacaccccgtcaccgaaacatttcactgtttagctaggttaaaatttttatatttatgtgtatatactatatgtttactccccttattttcttcgtgtttttacttttttatattttgagaccccagctctgccgctggacatagtgtgattgtccaaagcatagtgaacttttactaggttagcgattgctttactaatatagtattgaaggacattgatgtcttttctgtttatgtgtttatatgtagaatatacacattcagatggtgggataagtatcttatttttttgatttttcaagttgtttgagaaactgtcttgtcatattttcttcgtttacaggcttttgattttaattcgtattgttgtactcggactttttcttcaatggagggtcagtcatcccaacaatgatgctatatggctgtggtatatgtccataatctgtgagatatggtttgcattttcgtggctactcgaccagcttccaaagttatgccccgtcaatcgtgctactgatctcagtgttttaaaagagaagtttgaaactccgtctcccgccaatcccactggaaaatctgatcttccaggaatggatgtatttgtttctacagcagatccagagaaagagccaccactagttacatcaaatacaatactgtctattcttgcaacggattaccctgtggaaaaactttcttgttatgtatccgatgatggaggtgctcttttgacttttgaagcaatggcggaagctgcaagttttgctaacatttgggtccctttttgtcgtaaacatgatatcgaaccaaggaatccagagagttacttcagcttgaagagagacccttacaagaacaaagtacgtcaagattttgtcaaggaccgtagacgtgttaagcgtgaatacgatgaatttaaggttcgtatcaatggccttcctgattcaattcgtcggcgttctgatgcctataatgctcgagaggaaatcaaggctttgaagcttcaaagagaaagagctggtgacgaacctttggaacccatcaagataactaaggccacttggatggcagatggaactcactggcccggaacttggatggcagctgctcccgagcactctaagggtgatcatgctggaatcatacaggtattgatcatgcttgtttacagcgtctaataatacgctgtcatcccattgtctttaagagtttggggggttgtcgattttgttgcctaatgtcttttattcgaaggggagttggaaaaatggtaaggttgtctccatgtaacttataggtcacgggtttgagccgtggaatcagccactaatgcttgcgttagggtaggctgtctacatcacaccctttagggtgtgaccctttccccaaccctgcataaatgcgggatgctttatgcatcagattgccctttaaaagtctttgattcacaattattagaccgctttatcattttggtttccttgctaattgtaggtgatgttaaaacctccaagtgacgaatcgttgcacggtggtacaactgctgacggcagtatgattgattttacagaagttgatattcggctccccatgctggtatatgtttctcgtgagaagcgtcctggttatgatcacaacaagaaggctggagccatgaacgcattggtccgagcatcagctgtcatgtccaatggcccttttattctaaaccttgactgtgaccactacatctacaactcacaagcaataagggaaggcatgtgttttatgatggaccgaggaggggatcgtatttgttatgtccaatttcctcagcggtttgaggggattgatccttctgatcgctacgcaaatcacaatactgttttctttgatgtgaatatgcgtgccctggacggccttcaaggtccagtttatgtggggaccggttgcctcttccgtaggattgctctttatggttttgacccaccacgagcaaaggactaccaccctggttgctgcagctgttgctttggtcggcgcaagaataaagccagcgtcgctgatgaaaagagggcgcttagaatgggtgatgatgatgaggaaatggatcttgctttgtttcctaaaagatttggtaactccaatgtcctcgttgaatcgatcccagtggccgaattccaaggtagaccactggccgatcaccctgctgtaaagaacggaagacctcctggtgcactaactattccaagagagctccttgatgcttccactgttgccgaagcaatcagtgtcatttcgtgttggtacgaagacaaaaccgaatggggaaacagagttggatggatttatggctcagtcactgaagatgtggtaacaggttataggatgcacaataggggttggagatctatatattgtgtgacgaaaagagatgcattccgcggcactgcaccaatcaatctgactgacaggcttcaccaggtcctacgatgggctactggttctgtcgaaatcttcttctcaaggaataatgcgtttctggctagtccgaagatgaagattttacaacggatcgcctacctcaacgttggcatctaccccttcacctcaatattcctgattgtctactgcttcctcccggcactctcacttttctcgggtcaattcatcgtccagagccttaatatcacctttctcgtgtatctccttgtcatctcattaactctctgcatgcttgctattcttgagatcaagtggtccggcattgctttggaagagtggtggcgtaatgagcaattttggttaatcggagggacaagtgctcatcttgctgctgtacttcaggggctgctaaaagtggttgctggcatagagatttcattcactctaacgtcgaaatctgctggtgatgaaaacgacgatgagtttgctgatctctatatcatcaaatggacatccttgatgattccacctattacaatcatgatggtaaacttagtcgcgatagcagttggtttcagccggacaatatatagcacgataccacaatggagtcgtttgctaggtggcgttttcttcagcttttgggtgttggcgcatctctatcctttcgcgaaaggactgatgggacgaagaggaagaacgccaacgattgttttcgtctggtctggacttattgccatcaccatttcacttctttgggttgcaatcaatcctccagcaggtaccactgaaattggaggttcatttcagttcccttaactcttattacacaagaacaacaacaaacccgcagaccttacccctacccggggaggtagagagactgtttctgacagacactcgagttaacttttattacacaatcaattcaaattattcttttagttctattttctttctattcttgatatgtaaggaaagtgaacaagggaattgattttttggtgaatttttcatcacatttgtccttgaagtttttattgttggctcaatgttcataagaaagaacagcaaatacaatacattctttgtaatcagaacctcaaaatacaatagtgaaattg

SEQ ID NO: 275 - DNA, 3414 bp, Nicotiana tabacum
atggctggaagatccttcaaaccttcagactcacagcaagctaagcctccgggtgtgacctttgcgaggagaacttcatcgggccgatatgtgaacttatctagggactccctggatagtgagattagcgctcttgagtttgcgaactatacagtgcatatgcctccgacacctgataatcaaccttttgatccttccatttcacggagggttgaagaacagtacgtgtcgaattccttgtttagtggtggttataacagtgcgactcgtgcacatatgatggataaggtgattgactcggaaaccaatcatcctcagatggctggtactaaagggtcatcttgcgctatacaaggttgtgatggaaaagtcatgagtgatgggaggggtgaagatattcttccttgcgaatgtgattttaaaatttgccaagattgttatgttgatgctgtgaaaactggtgacgggatttgtcccggttgtaaagagccatacaagaacactgatttgactgaaaatgatgttgatccctctagacaacctttgtctttaccttcaaatgttgggatgtctaaaatggataggaggttgtcagtgatgagatcagctaataagtcagcccttgtaaggagcgagtcggggttgatgaggagtcataccggggattttgatcataatagatggttatttgagacgaaaggaacatatggatatgggaatgctatatggccacaggatgagggatttggaaatgagaaagatgatgacattggtgagcattctgaacttctcaacaagccgtggaggccacttacacgtaagctgaacatacctgctgcagttctcagcccataccggcttttgattttaattcgtattgttgtactcggactttttcttcaatggagggtcagtcatcccaacaatgatgctatatggctgtggtatatgtccataatctgtgagatatggtttgcattttcgtggctactcgaccagcttccaaagttatgccccgtcaatcgtgctactgatctcagtgttttaaaagagaagtttgaaactccgtctcccgccaatcccactggaaaatctgatcttccaggaatggatgtatttgtttctacagcagatccagagaaagagccaccactagttacatcaaatacaatactgtctattcttgcaacggattaccctgtggaaaaactttcttgttatgtatccgatgatggaggtgctcttttgacttttgaagcaatggcggaagctgcaagttttgctaacatttgggtccctttttgtcgtaaacatgatatcgaaccaaggaatccagagagttacttcagcttgaagagagacccttacaagaacaaagtacgtcaagattttgtcaaggaccgtagacgtgttaagcgtgaatacgatgaatttaaggttcgtatcaatggccttcctgattcaattcgtcggcgttctgatgcctataatgctcgagaggaaatcaaggctttgaagcttcaaagagaaagagctggtgacgaacctttggaacccatcaagataactaaggccacttggatggcagatggaactcactggcccggaacttggatggcagctgctcccgagcactctaagggtgatcatgctggaatcatacaggtgatgttaaaacctccaagtgacgaatcgttgcacggtggtacaactgctgacggcagtatgattgattttacagaagttgatattcggctccccatgctggtatatgtttctcgtgagaagcgtcctggttatgatcacaacaagaaggctggagccatgaacgcattggtccgagcatcagctgtcatgtccaatggcccttttattctaaaccttgactgtgaccactacatctacaactcacaagcaataagggaaggcatgtgttttatgatggaccgaggaggggatcgtatttgttatgtccaatttcctcagcggtttgaggggattgatccttctgatcgctacgcaaatcacaatactgttttctttgatgtgaatatgcgtgccctggacggccttcaaggtccagtttatgtggggaccggttgcctcttccgtaggattgctctttatggttttgacccaccacgagcaaaggactaccaccctggttgctgcagctgttgctttggtcggcgcaagaataaagccagcgtcgctgatgaaaagagggcgcttagaatgggtgatgatgatgaggaaatggatcttgctttgtttcctaaaagatttggtaactccaatgtcctcgttgaatcgatcccagtggccgaattccaaggtagaccactggccgatcaccctgctgtaaagaacggaagacctcctggtgcactaactattccaagagagctccttgatgcttccactgttgccgaagcaatcagtgtcatttcgtgttggtacgaagacaaaaccgaatggggaaacagagttggatggatttatggctcagtcactgaagatgtggtaacaggttataggatgcacaataggggttggagatctatatattgtgtgacgaaaagagatgcattccgcggcactgcaccaatcaatctgactgacaggcttcaccaggtcctacgatgggctactggttctgtcgaaatcttcttctcaaggaataatgcgtttctggctagtccgaagatgaagattttacaacggatcgcctacctcaacgttggcatctaccccttcacctcaatattcctgattgtctactgcttcctcccggcactctcacttttctcgggtcaattcatcgtccagagccttaatatcacctttctcgtgtatctccttgtcatctcattaactctctgcatgcttgctattcttgagatcaagtggtccggcattgctttggaagagtggtggcgtaatgagcaattttggttaatcggagggacaagtgctcatcttgctgctgtacttcaggggctgctaaaagtggttgctggcatagagatttcattcactctaacgtcgaaatctgctggtgatgaaaacgacgatgagtttgctgatctctatatcatcaaatggacatccttgatgattccacctattacaatcatgatggtaaacttagtcgcgatagcagttggtttcagccggacaatatatagcacgataccacaatggagtcgtttgctaggtggcgttttcttcagcttttgggtgttggcgcatctctatcctttcgcgaaaggactgatgggacgaagaggaagaacgccaacgattgttttcgtctggtctggacttattgccatcaccatttcacttctttgggttgcaatcaatcctccagcaggtaccactgaaattggaggttcatttcagttcccttaa

SEQ ID NO: 276 - protein, 1137 aa, Nicotiana tabacum
MAGRSFKPSDSQQAKPPGVTFARRTSSGRYVNLSRDSLDSEISALEFANYTVHMPPTPDNQPFDPSISRRVEEQYVSNSLFSGGYNSATRAHMMDKVIDSETNHPQMAGTKGSSCAIQGCDGKVMSDGRGEDILPCECDFKICQDCYVDAVKTGDGICPGCKEPYKNTDLTENDVDPSRQPLSLPSNVGMSKMDRRLSVMRSANKSALVRSESGLMRSHTGDFDHNRWLFETKGTYGYGNAIWPQDEGFGNEKDDDIGEHSELLNKPWRPLTRKLNIPAAVLSPYRLLILIRIVVLGLFLQWRVSHPNNDAIWLWYMSIICEIWFAFSWLLDQLPKLCPVNRATDLSVLKEKFETPSPANPTGKSDLPGMDVFVSTADPEKEPPLVTSNTILSILATDYPVEKLSCYVSDDGGALLTFEAMAEAASFANIWVPFCRKHDIEPRNPESYFSLKRDPYKNKVRQDFVKDRRRVKREYDEFKVRINGLPDSIRRRSDAYNAREEIKALKLQRERAGDEPLEPIKITKATWMADGTHWPGTWMAAAPEHSKGDHAGIIQVMLKPPSDESLHGGTTADGSMIDFTEVDIRLPMLVYVSREKRPGYDHNKKAGAMNALVRASAVMSNGPFILNLDCDHYIYNSQAIREGMCFMMDRGGDRICYVQFPQRFEGIDPSDRYANHNTVFFDVNMRALDGLQGPVYVGTGCLFRRIALYGFDPPRAKDYHPGCCSCCFGRRKNKASVADEKRALRMGDDDEEMDLALFPKRFGNSNVLVESIPVAEFQGRPLADHPAVKNGRPPGALTIPRELLDASTVAEAISVISCWYEDKTEWGNRVGWIYGSVTEDVVTGYRMHNRGWRSIYCVTKRDAFRGTAPINLTDRLHQVLRWATGSVEIFFSRNNAFLASPKMKILQRIAYLNVGIYPFTSIFLIVYCFLPALSLFSGQFIVQSLNITFLVYLLVISLTLCMLAILEIKWSGIALEEWWRNEQFWLIGGTSAHLAAVLQGLLKVVAGIEISFTLTSKSAGDENDDEFADLYIIKWTSLMIPPITIMMVNLVAIAVGFSRTIYSTIPQWSRLLGGVFFSFWVLAHLYPFAKGLMGRRGRTPTIVFVWSGLIAITISLLWVAINPPAGTTEIGGSFQFP

SEQ ID NO: 277 - DNA, 4804 bp, Nicotiana tabacum
ggggtctccaaaattttggcttctcccactgttcctctctctgttctctctctttagctctctcctatatatacatacattttttatatgtatatgtgcatgtaaaattatacatacacatcaatcttgaaacactccatttccctctttgaagctctttgggcaattttgccgaggacctcaataatctgtatgtttaattttcttgttccccattttcttttttatgggttttatattatttatttttttcattttcaagatttgttggtatttgtttctgtgttttttgggttatgttctataaaattcatgatgtttttagatgatggtatttggtttctttcaaattggaaatgaaatttgaggtttttcatgttaaagttttgatctttattatatttttctgggtttttatgcattttcatgttaaagttttgatcttttttgagaatcaagtaatgatctttctgcaaattttagagggggtttgtagggtgggggggattaaggctagtagacaaattcaacaatcaataatgtaatatagtatggctcaattcatattaattgaggtgccaggtgtttgaatcatttgtatttatttataggccggttggccaagcttctttttgggcaaaaattgtccaaagcacttttggccaaaaattaaggtgtttggccaagcttttggaaggaaaaaaagtgcttttgaggagaaacacaagcagataagcagaaaaaactagcttctctccaaaatcacttttttgagaagcacttttgaaaaaaatacacttagaagcagttttttaaagcttggtcaaacactaattgctgctcagaaatgcttttcaaactaattagccaaacacaaattgtttctcaccaatagtacttttgagaaaaacactttaaaaaaaaacactcctcaaaataagctgatttttgcagcttagccaaacgggttattactcaatttgattcgaattgtttagaaaattaaataattcttaatgattgttaacttatattaaccctcctcgtttatctgagcttgagacaaggctggtagacagttaagaagaatgaaaaactagtttttttcttgtcttttgactttttaatggcaaaatcgtgtgcttgacatgtgccattagtcaaagaagtagcttgtcatttcttattgttaattctccatttacttcattttctccccctagtttttatggttttatttggtaggtatggcactactgctttcttttcatattttcttgagccgagggtctatcggaatcagcctctctaccttcactaggtaggggtaaggtttgcgtacacactacctccctagactccacttgtgagattatactagatttattgttgttggtggtggtggtgtgtatggttggaaattagttggtaaaagcataacctatgagtttgtatagtatcatgaatataactacatgtcatttgtttggatgtattttgatgtttcctatatgttgttatgggaaatgagtaatccatagtggttttatgttctgtatttgagagttgacaagttagttatactatatattgttatgtgaatttgtgtcttgtgatttgtgaggtgttataatggttttgatgatatattgtagtgaagctggtcgtttgacgcgaatctagttgtgtgcttcctcctcggtctccattaattggaagatgggctgttttagttctacagcaagacagcagtttcaaggatacgaagatcctatattcctagcatcccaaacagcatgtgagttcataatgatcttggtataatgacgttttactgttttagtatgttacgattgatttgataaagttgaacttgttttgtgaagttgaaaattttgagatgaacaaatggagaaactgtgagggtgaggttaaagtaatgatctttttggactggaacacaagattccgccttttctgtaccaataattctgattttacgtatggaaaatccctcgatatcttgttcctttttggtggagagatactatcgagtcacttgtatttaacataaccgtgcctaatgtttttccaaaaagtggtgacgaaacgtacaacttgtacaaatttccttgttattttttaaggtgctaaatacatttacaacaggaagaaattttagagtttgatctgatgttagaacacagttaaacagtgaattttcatcatttatgcaaaagaaagtagtctttctgagttgtgctgaaaatcattcaaaagagtagcgaggtttattatctttcgatttactcttacaattgaaattcttatgtagtatacaaccctcctccacgtgtcttatttggtttcctttctgttattctcctctttttgcagttaccgtaagtgaagttcaggcattatttgagatgttcaagactattagcagtacagtaattgacgacgggttgataagcaaggtaggctctattgaactggtgaaattggattcggtggtgcttatgatttcttgttgcataattccagatggatagtttaagtttaaaactagactatgttacctgtgtccggggcctaaaacagaacattcatgttggatgtgcaggaagagttccagttggcattattcgagaatagaaaaaaagaagaccttcttgcaaatcgggtatggtatttcattggtatatttggttttgttctacataatgcttattagttcgttctgaacctatgttgctcagactccccaaaaatgttgtcgggtgcgtattggatcctccaaaagtagtgtatttttggaggatctaatatgggtgcaacattattttggaaagttcgtgcaacatagctgagaattggaacatgttatataagaattgctcaagtaaacatgccattagggttaatgtgtcaaagaacacacataagtggttcaccaaaatatggatgtttaacttatggaatgcattgagtttatgttgtgcggactctccaaaatgatgcagcactcgtgttgcatcctccaaaaatatactacttttggaggatccgacacacactcagcaacttctttggagagtccaagaaaaacatagcattgacgtggcaagcatgctaatattatatatttacttatctttattgccttggtgggatattaatttcttctaggaactttccattgcagatttttgatctatttgatctaaagcaaagaggagtcgtcgattttgaggattttgttagggtaatgaatgtattccacccaaattccccccaggaagataaaatcacttgtaagtaaagaaaaaatgatatagctatgtgcttcttattaattgtttctagtttaatgattaattgcatgcgaacaatcacacggaactccatcttttgtgctattgcagtttcatttaggctttatgatctggacggctcagggtatattgaacggcaagaggtatgatatatttatgtatattttgtttctctttcgtgttatgttgagagtcacctatgtggttctcgttatgttttgtttattgtaggcttcattattttgtggttttacataggttaaacaaatgttgattgcgcttctacgcgagtctgatatgaagttggctgacgaaaccatcgagataatacttgataaggtaattttactgatgataacccatcaaatttcatgatcagatggtttttcttttttcgggaaaatgcatcatcgctctaggttattgtccacttcgcattaagataaccttttcacttgcttttttttttttctggaaatttgcggtcctaatggtagtctcaacgaacttgaataattagtgattttatttcaatatgcagacattttcagaggcagattcaaatcaggatgggaagattgacaaatctgaatggcgaagttttgtggctcgaaatccttcattattaaagataatgacacttccatatctaaggtatagcatttgatcactcatatatgtttgcaccattaaaagatgagtttaactcaggtccatcaacagacgacaatatatagaatttttacagtatacaagtcacatttacctatacctattgcaatatattttaggtcgcctgatagtgtaatttttttactgtcgttgtatacaagttaaaaaaaaagggtagcccgatgcactaagctcccgctatgcgcggggtcaggttaacggccgaactacaagggtctattgtacgcagtattaccctacatttctacaagaggccgtttatacggctcgaacctgtgacttctggtcacagagacagtaactttacccgttacgccaaggctccccatcttcggtgtatataagttaaactcttaaaaaagattggacgaggaatatatcggctgatgagatttgtacatgttttaatgcagggatgtaacaactacttttccaagttttgtatttcattcagaagttgatgaagtagctacttgataataggaaatgctagttcaaaattagttctttctcctccacattttcttttgtatttttcccctaatatattaaatgtatgtaaatttgttggggaaaatgcgaaagatatatctatattgtgtgaggaggttttggtagcctccctttttgtaaagtgattatacttttgccaatttggccgattaatagtgagtttagattggctttttgtttttatttacagagataattgttccaaatctgtgtagatgattgatttttcacaagaaatcacattttattttgatgttttt

SEQ ID NO: 278 - DNA, 642 bp, Nicotiana tabacum
atgggctgttttagttctacagcaagacagcagtttcaaggatacgaagatcctatattcctagcatcccaaacagcatttaccgtaagtgaagttcaggcattatttgagatgttcaagactattagcagtacagtaattgacgacgggttgataagcaaggaagagttccagttggcattattcgagaatagaaaaaaagaagaccttcttgcaaatcggatttttgatctatttgatctaaagcaaagaggagtcgtcgattttgaggattttgttagggtaatgaatgtattccacccaaattccccccaggaagataaaatcactttttcatttaggctttatgatctggacggctcagggtatattgaacggcaagaggttaaacaaatgttgattgcgcttctacgcgagtctgatatgaagttggctgacgaaaccatcgagataatacttgataagacattttcagaggcagattcaaatcaggatgggaagattgacaaatctgaatggcgaagttttgtggctcgaaatccttcattattaaagataatgacacttccatatctaagggatgtaacaactacttttccaagttttgtatttcattcagaagttgatgaagtagctacttga

SEQ ID NO: 279 - protein, 213 aa, Nicotiana tabacum
MGCFSSTARQQFQGYEDPIFLASQTAFTVSEVQALFEMFKTISSTVIDDGLISKEEFQLALFENRKKEDLLANRIFDLFDLKQRGVVDFEDFVRVMNVFHPNSPQEDKITFSFRLYDLDGSGYIERQEVKQMLIALLRESDMKLADETIEIILDKTFSEADSNQDGKIDKSEWRSFVARNPSLLKIMTLPYLRDVTTTFPSFVFHSEVDEVAT

SEQ ID NO: 280 - DNA, 3699 bp, Nicotiana tabacum
atctcacatcagttagaggtcgcaactcgcaagtgagagaaaaatggcgaaatcttcagcgaccaaagacgctcaagcacttctccactctctccgttctgcttacgcttcaactcccactaatctcaaggttacctctctctctctctcccccctcgtcattttatattcataagagcaattttagatctatatatcaatcaatcaatatatctcaacactaatgttgccaaattagtcgggatcagctatataattcttttatatcaaagattattataattatactactgaatccttaattgatttttttgtttttgttttgaaacagatcattgatatatatgtactgtttgcgatattcaccgctgtaattcaggtaatatatatatattttgttttgaatattcggatcttatatgtacttgcggttagatttatcgatgttattgtatagatctaggtattggtttatattgttgctatgttatttgtattgataaacttagacgatacggggctaatattggaattatttggttctttgttttaaaatgtggttagtttgaagctttgagcaaaatccaattcttaattgaaccatttgttttggatttcgatgctggggcttagtgagttcatggcgggcattatgcagcgtaagcagatttatgtttatggtagaggagcgggctcattatcccagaggtctgaaggctgctgttttgtcctaaggcttggccctagactgaaaaaagaaaaacaaaaaacgaaagtagatttaggtttaatcggcatttgatctcttggtcatctcagatattgctaatgtgttatatgtagcatttaaataccaatgaagagctcataccctcaaattgtgctgacggtacaatagaacccacaagccataacagttggatggaacctttgattgtggagttcgagattgcttgtggttggtctaactctggagttaatgtttaaattgtattgtaagcagaaaactttctgcaaaagattttgagcattctcacaactgtaaacatcaatttttgcttaaagtacaagtttgcataaataacatggccaaatcattagttagtaatcggtctttactgtagaaagaaacattctttctaatgtcattgtcttagaaaagcttttgtcgaaccaagggaagagtctacactattacttctttgatgagggaaagcgcaccaccatgcatatcatcatttataactcctctggtgtctgttgttgcttcagaagcatctccttttctgtgctcacatcacaaaaagaagtctccttgcacttatcctatttcttgaaattcctgtactggatcttggaagcagcactgttcaggttattgcactgctctagtgttaatatgtccctagaaatctatgcttaagtgaatttacagtttctcctcatgaaaggcctttgatgccttggtattccttcacaatttatgaccttacattgatcagacttgataacttctcctggttgggacttgatgagcagtcatctattgcctggggtaattaatatgaactgtaaaagcacttgggcatcggtcaagctcaaactgtgatgtcaaagagatcatctcccatgggcttacacttgagagttgatatcttccttctgttgtagagaaaaaatgacatctccagtgattgttttaggcgctttaccagactttgaatgttatcttttgtctatttgacatacccttctgcacaacaacctccaacaccttctactcttgcacaaccttctcaaccttacaccgcaagcacctatttttcgagttaatggtctcatccatacccttatcttcattacaagcccttaactcattacaagggtgctacatctggtggatcagggatggagcgatgtctctggtagaatgattcaattgaaatagccagaaaaactcactaaagcacctttatatgaatcttctgcctttggcatatgggcacaaggcattgcgagaaagtgagagcttctgcggggaacctcgaaagggtgaatatcatcctatttcactttttatcttcttccgcttctacttccaccgataccaaacaggttaatattaggtcaggtgcaccacctccaccactcattccttgagaacatctttcactgcatagatcatatatctcatgcttctacaggtcactcaaaacctcattctcttaggctagctctttaagctattatgggttgcccttattgaaattggttcttgatgacagtgtaacagaagcatttgcttggactctgccatagtactcggtgtgttgttcttcttttacccgtccaaaacatgccatagtactcggtgtgttgttcttcttttacccgtccaaaacatcttttgatcgcttaactagtcaaaatgacctgcaaatgatagaatgtgaaaccagcaatgaaaggagtaacactcttgatacctggcgttaggtgttcggaatggaggtgagatatatattacacatcatttattgaggttatgcgacatgttcgaagttctatgtgattatgcaaaatgcttgccggttttcctttggaagttagtaaagcctcttattttagtcagaatgagtccttgagaccagagctgctcataacattgtataaaaagaagaaagctagaaattcatgctatcccagattcgactatagctcgtaagcaacgtaagatctatttgaagtttccctgtgtatagagcttcgctgctgtttcatgcctgcatggagagcctttcagctattttactgctcatgcctaaagagtgcggaatttattctgtatctgaaattgagacatcaacttgcttggtttatccctaatggggattgttgaccctttttcactttatcaggttgggtacatggctattgttgggtccttcccattcaactcttttctctctggggtactctcttgtgtaggcactgcagtccttgctggtgagcttattgttctctgtcatacacttcttcgtgggaaaatgttgagtttaaccgattttatctatctttggtcgcagtttgtctccgaatccaagtaaacaaagaaaacaaggaattcaaggtaagctttttcttgggaaagatcttctctcatagtttccagctcattgttccatcttactttcactgaaatgcaaggagaaactgaagttttacatgagcaacgactgcatggcgttctcatcctaatcctctaataacttgctcatttcctcatagaagcagagaactattacctattgctatttccttatttattgccactactgcaggatttgccaccagaacgtgcttatgcagattttgttctctgcaatttggtgctccatttggtgatcatgaatttccttggatagattgacgttcttaatctcgagtgaatgctgcttatccaaatattcttgtctgtaaggatgctgttaaggcaagcactttagcaatatgagagttctgtttccccttttccatcttcatttatgaacctgataatttgtcaattagacagtgttactttggatatctggtctttgcagttttagaagtatgaactttacctcatgaaatatacgtacctgtcctcccttggatttttgtttgcgctcatcatttttaataatttagctgttcaag

SEQ ID NO: 281 - DNA, 351 bp, Nicotiana tabacum
atggcgaaatcttcagcgaccaaagacgctcaagcacttctccactctctccgttctgcttacgcttcaactcccactaatctcaagatcattgatatatatgtactgtttgcgatattcaccgctgtaattcaggttgggtacatggctattgttgggtccttcccattcaactcttttctctctggggtactctcttgtgtaggcactgcagtccttgctgtttgtctccgaatccaagtaaacaaagaaaacaaggaattcaaggatttgccaccagaacgtgcttatgcagattttgttctctgcaatttggtgctccatttggtgatcatgaatttccttggatag

SEQ ID NO: 282 - protein, 116 aa, Nicotiana tabacum
MAKSSATKDAQALLHSLRSAYASTPTNLKIIDIYVLFAIFTAVIQVGYMAIVGSFPFNSFLSGVLSCVGTAVLAVCLRIQVNKENKEFKDLPPERAYADFVLCNLVLHLVIMNFLG

SEQ ID NO: 283 - DNA, 4314 bp, Nicotiana tabacum
gcctatgctattttgacacttgctaatgaaacccggccgggtcattttgttagtttagtggccaaaatccaaacaagaaggaactgaagttcaaaatttgtagtcgttatagagagagaaagaagagagagagagagatgatgggaagcgacacaaactcaacatgggttggaagaaaaccaatgagacgaattggtgggatgtcagatgcgctctctattgctgctgaacttggcttctctgttcctcctccttcttctcaggtccattttttcatatcctacttataattttcttttaaacatatgcctttacaagttcgtaactttattgttgtcaatagttataattgaaaacctgttgatgaattcccattttactaagcatttgggtcctatttggttgcaattgatctgattgcgatgcacgtgaaatttaaccgtttcggaagttacatttatttaattaggttttgctgaaggaaaaagaaaatgattagagaattttgactaaaattgagatgcgactttaaaatgtggaaactggcttttgcagaaatacgagtaagactgcgtacaatagacctttgtggtccggctcttccttggaacccgcacatagcaggagcttagtgcaccgaactgtcctttttaaactttaaaatgctgctaggaaatgggtgaaattgtgggtgggtgggtgggggggaatttacatggttaactcaagattctagatgtttcttgctaaaaagtgactattcccactttaagatgaggcaaaaaaaaataccatatgatttctttcccatttgccttagccttggtggcagagttattcggtactataaactggtggaaggtagcaggtacccattagaatagtcgcagtgccgacaagatagccccgacaccaccttaaaaatgaagattgaatattccacgctgcaactctgaatttgttttatacttgaatttaatttaggagatttttaatattgcagtttatctatgctttcatgattggttgagcccttccccattgcaggtttcttttctttcttttaactcttttatttcctttctagacaaattagcacttttaatgtaagtcctatgttgtctaggagtggtttagccttttagagatttgtactttcagaaaatatcgagaacttcaactacgttttatttgtatgtgcataatattggcatgaaatgagtttctatggagtaacatttgtccgtaaggattcatataaccgaccctaagtctttaagaaagagtcgtagttgctgttgttgtagaagtagtaatagtagtagtagtgtttgctttcttaggatggttatttgagctttatttgtacttatatttagcggaactaaacaatgttccccttgtttaggaggagatccaaaatttatccaccaccagcggtgaaaaaggtgatgacttgataagggtcttgaaggaactcactgctgttcaaaggaaaattgcagatttacaagtggaacttcagggtcgaaaggtgacatttgttgagattctactgaaattcatctatttttgtaaggttttacatgttcctcaaaatatccaacacgaaatggtgctttgaatctagtgaatacgcttcctgacagtatgattttatatcacttaatttttcacttgaccctagtatatagatgtcctatccatttcagcaggagatgggtaccaaatcgttcaaaataatccgaaaacttccctaaattagttttctgtaattcaggtcagcgcatgatttgtccggccaatctgagtttgaaattgttcagtcgaaagaacttaaccaataaaaaaaataaaagaacattctttcctttgaacaatgttaacaaaagttcacagagccttatacaattatttgttttggtattaattaatacctgttagatgtggttctctatttactatttggtcatccgagtattcaaatgcataaagagctttggtgctatagttagggactagctcatattgggttggcagctcaatttaatagtttggtaaattggtcaagataggtgatcagtaatgcaatgagttctctgacgagcttggacctctaatataacatgtctatgtctaccttaaatgcacaataacttagtcttccgggtgatgacatcttgcaaaaaaaatataatactactacattcactagaaagcatcttgagtttgaatctaaggactgggcgcagagaggttttgcagcttccttacctataagtttaactcaaactgtactttctgtttgtttttcacttcttttcgcttccttgtggactcctgagtgataggacattataaattgagttaaaaggactaaaaattacgatatttgattttcatcactttggtaacctgacaactttactcttttagatgatatgatgaactaacacagtactgtggtgcaactttaggaggacaaaaatgttgctcatttgacacatgtcagtgaaatggaaaagaaaatcgaaacattgcaaaggattactactattttgaaggacgttattcagaataaggtaattgaccttctgaaatttaacttctattttcttctttgttttacatttggtgatattcaaatatttcattatgatctcctccgtccacctttttgaaactaaaccaaattccctccaatagtgggaggcatcaatcctacttgtgtcaattggttaagttacttgcattagcttgcagttgcttctagcaaagagtattgacaactttatttgatgtgtactgaagcaaatttcgtccaatagcagaatgaatagtattctcttatctaataattttgtcattgtcattgtcatttctttccctaattgcttcattttgctgctgtgtttgcataaatatcttgtgtgggttttttaggaccgcataatagctcgccttcaacaaccatattcgttggattgcattcctgtggaagctgaatatcaggttagttacttgtcatcgcaagaaactcagatgcttctatgtcggtctttagctttttcaaatgttctttgtaccgttcagccatgtgatgagccaatagatataaatgcctaacgttattgaattgtgcagaaacaattttcagaattgctgatgagggctgctagtgattatggtgctttaacggcctctgtagaagattttcaatggagtcagaaatttaaagaaccaccaacagtgtggggggtatgcacttcttgtttccaatcctgatgattaaccttatcgtcatatatattattaaaataaaacatttgttttggtggtttgactactgcagttttatttgtaattttgtactaaaaataatactagcatgatagcatatgttagcatatatctgtcctggtgacagttggtaagtgttcgatcaatgatactcatttttaattccctagttgtttgatgcaagaaactgttattttctttatgtggaatggcatgtcactgtagttctatatatgcattgatggaaagaaattgagaaacacaataagaaggaatgacgaaaatgaagtgtgttgcagttagcaggtcctacgactgtcaaatagccacaaagaacttcatgaattatcatatctggataggaaaaggaagttccaacgttctagacatgataccaagtcttgcatttattttggagtttgatgtttaacaattaatgtaggaaatgcttcgtccgattcctgttgctttggcttcttgcaccatattctttgaagccatgtccgcaatgagggagtcattcgcagcgctacaagctttgagagttggtcattcttcttccttggctaaagtaccgagcaaggatccttctcaaacaaatgttggagattctgattgtgtgactcctcccccagtgagaaccgaatcgagcttcgatgatttagcagtcggaagcttgagaaggcaagaaagtgagccacaagaaggtagtgaaattgcaaaaggtactgatggcatgaaccacagtagattgtcatggcctccttcagttaagaacatctcataatggtataaatacttaacatatgtcatttttggttatctttgtatttgtttaggtgattgtatatatatatatgtatgatgggtgctaatttcttttcattacatggttgaaggaggtccctttagtgaatccatgtgatgtttgtttggttttactcttgtaatcctactcttgaactgtccatatatatataaacagtcatgaactgcagccatttctggcaatgt

SEQ ID NO: 284 - DNA, 885 bp, Nicotiana tabacum
atgatgggaagcgacacaaactcaacatgggttggaagaaaaccaatgagacgaattggtgggatgtcagatgcgctctctattgctgctgaacttggcttctctgttcctcctccttcttctcaggaggagatccaaaatttatccaccaccagcggtgaaaaaggtgatgacttgataagggtcttgaaggaactcactgctgttcaaaggaaaattgcagatttacaagtggaacttcagggtcgaaaggaggacaaaaatgttgctcatttgacacatgtcagtgaaatggaaaagaaaatcgaaacattgcaaaggattactactattttgaaggacgttattcagaataaggaccgcataatagctcgccttcaacaaccatattcgttggattgcattcctgtggaagctgaatatcagaaacaattttcagaattgctgatgagggctgctagtgattatggtgctttaacggcctctgtagaagattttcaatggagtcagaaatttaaagaaccaccaacagtgtggggggaaatgcttcgtccgattcctgttgctttggcttcttgcaccatattctttgaagccatgtccgcaatgagggagtcattcgcagcgctacaagctttgagagttggtcattcttcttccttggctaaagtaccgagcaaggatccttctcaaacaaatgttggagattctgattgtgtgactcctcccccagtgagaaccgaatcgagcttcgatgatttagcagtcggaagcttgagaaggcaagaaagtgagccacaagaaggtagtgaaattgcaaaaggtactgatggcatgaaccacagtagattgtcatggcctccttcagttaagaacatctcataa

SEQ ID NO: 285 - protein, 294 aa, Nicotiana tabacum
MMGSDTNSTWVGRKPMRRIGGMSDALSIAAELGFSVPPPSSQEEIQNLSTTSGEKGDDLIRVLKELTAVQRKIADLQVELQGRKEDKNVAHLTHVSEMEKKIETLQRITTILKDVIQNKDRIIARLQQPYSLDCIPVEAEYQKQFSELLMRAASDYGALTASVEDFQWSQKFKEPPTVWGEMLRPIPVALASCTIFFEAMSAMRESFAALQALRVGHSSSLAKVPSKDPSQTNVGDSDCVTPPPVRTESSFDDLAVGSLRRQESEPQEGSEIAKGTDGMNHSRLSWPPSVKNIS

SEQ ID NO: 286 - DNA, 6004 bp, Nicotiana tabacum
tggacacgtgttttcaggcgaagaagaagtgcgagatagagagaggaggttggtctttgaaaagagaagaagagggagatttatgaattctttgagtgggtctgtggtgacactcgtagataacattgatccttgaaattatcgagaaagtacacaattgtagattttctggtgaaattgggaaaagagtcaaagacccagttcagttgttagcgtacaaattattttagttgcgatgagttcaggaaatgtggggcggctgccattgatggatgttgttaaatttaagggagtgccaattctgcagcaattgcatttggaggaacggttgctcaggacttcacctcaaaactgttgcattgtaaatgatggaaccaatgaacccacaattgtcatgggtatttcagggtgagctatcaattttcacccttttttatggtatgactctttttttccatagtagtacttttgctagaattatttcttgattgtttttattggcgggttcattatacaacttattttgacgattggatttgtactttccttctgcttcactaattaatcttttaccatctttaaactatatagtgcttgtgggaaatggtggagccaggaaggggattcgaaaaatacgaacctaaagcaatttaacatatgtgtgtcataaagacactgataatgaggccagtttttccactttctgatattgtttaggctgtatattctttggagctaagctatcagtattaactgcactgctgttgtgcaagttctgatctatcagcttacaattgatgcaagaagttacgagtacttgatgtatgccatggccgtaatgataggacatttttgttgtatgtctctaattgagttaattgcataacaacattaaccattgtcacagaaaaccagctgaacttcttgaaatcggttctgttttgcaagacaagattccagtagtaaagaggtttactggaggaggcactgtaatagtcgatcacaggacagttttcatctccttcatattcaataaggatgttgtccctactgtacaaccatatcctaggcccatcatgtcatggagcagccaactctatagcaaggtgtttcaaggagttggggatttctctcttcatgaaaatggtacttttctgctccaagattattttcattgttgactgtccagctttttgcaggaagagctgcaggttttcttcaagaaccaacccccccccccccaaaaaaaaaaagtgtaaccttgcttttatgtcaaaaaaagggacttgcttttaaactttgttatggaggaaatacttgcttatacttgttgtatggtatttttgcactatatatttctctatctatatatttgtgacactgagttagtttgatattgttgaaatttatttgactaatcaaaaaacaaaaatagaagtttcaattggctggtaatgtatttatgctaaaaaccaaggttgagtgtcagactaacaatgatattacgctgcactcatcaagggagcttccttttatgtggatttaattatttgtggtagataaggttcacacattttctaattataacttcctgacaagaaaagtgtcattcattggattggatgcttccttttctgttttcttatttcttcttgttagcaatattgtattctttcttctctgtgcagttggttcccatttctatatacattgtgttacttggccttaaaagaattgtgaatactatcccccccccccccccccattctcttgccctgtcttgatatccgtctgactgtttgttttgtcctttatttctgttctttctcttttgctcacacggagatatgacttgaggaatccttgtttttatgtcttgctcaccagctttctaagacatccgacttcatattgttttttacatgatcacagactacgtttttggcaaccgcaagtttgggggaaatgctcaatctatcacaaaaggccgttggatccatcatacatcctttctttgggattatgagatgatgaacatggcttatctcaaacttccaaaacgagctcctgactatcgacaggtttgcaaaattttcaagttctttgttctgcttggtaaatagtctcgtgagcctttttttatgaacttgacgcagctgatttttgaacactctgtttctggaaacaccgatttaagttgttggcagaataaacttaatcgtgttcaagatcgatgcaaagtttcattctcgtacactgcaacatatggaacaactatgtaattaatagaattacattattattgaataatttcataaccgtacatatttttctcttccctctaatatatagtacatttaggtacagagaatagataaagcattttcatatagaaaatagtcgtggtggtgcttgcactgcatgcatactcttctaagctgatggtgtgaagacctctaagttggtgctgacatcatggtgaaaagatgaagcatgggtagtcttctctgtttcacttggcttgaggaatgggtactggattaattacttcggaaaatctgcaaaaaattggctcatgtcactgttaagggctgtcccaatgtggttataagataaatttactgaaggctctttcatgtgttctgaacaaatcatccctgaaactatggttgtggacttgtggcagtgagcctaagaagttgtttactatcaagtatacttggtagttggcttggctgaaaaggtaaagctagttaatctcagtttgcaagcagccacaatgttgaagtctgtgtacatgcatcgtcattactcacatatgaaatttccaagtttgtctttacgccttgtagtcttctaatttcctgcctgcatatcacctatatatcataatcttgagtgaaaatacactcgtgtcctcttaactaacctcttgcttaaggtccacatatgaaacatcctctttcaagtgctcacgtgggcaatcaagaacccaactatttcattattctgaatttttgcctggagtcatgccgtacccaggaatccaagttcaataactgcatgctgttgtgatgagctgaacccagacctccctcgcgatgagcatgccgccgcatgctctgtgtttggtaactggagggggagcatgtgatggacatgctatgggaccaaaacattctgttccaggctcctgccttgactgcactgtgctctcttttgtagcgatagttcctggcaatatcacctctttcgggtcattttccaacagccactttttcaataaattccaagtgaccaaatttttctgactattttcagcaagttttgtgatgcctattgaatctttttatgttttttaaccataaataaactcaactggttttcaaccttagcgggcatgtgagaatgttaagtgccagtgttagagtgttagaattacatttttgaaagaattaagttctttagttggatattctcacacattgacaaatctttatatatgtgagtctgatacctaaatagggttctagtatatattgaataaacaagttatcaaagtatcccttcctttttcttattttcacattagacttttctctagatgtaaattcttctctcagctgctacatcgtagtaccattaatatcttttttagcaaactaaactcagtaaacttatttattgacgtgttattcataacttatcaactagatgagatccacagtagttgggatccatttgtgcttatcactgattcatttactcccttctctggagtggttgtcctatttttctttctgatattcaagtgatataatctttgctaataattctcacaataattttcttcagtgttaagttggaaaacttacatttatctgtattcttttcgtaaattctaaatgtctgaatgtcatttaaataagaattttttataaatccacttaactcaatctaaagtataatcatataattgtaacaaatattattaagggaaaacaggaagataacttctacttattatatgagatccactggtgtcagagcctacttgtgcctgtaccaaggtctcgattgggaagttgatgagttccttatgtgcaagataactaaagctattcatgatcttatcttatggaatgccgtgtctaaacaatgccttttgaggttctagtagctaaagtaaatatggaggagctcttgtttgcctgttatgttggagcctcctggtcatctctatggtgcattcactctaggctctaacactgttaactcactaggagcctgagtattctgtggcttgaaggtttctagccagattcgtccctggaggccttctaagccactgtctcgacttctggacgtagagaacatttagtcgagtatcagcaactggtgataaaacctattcccagttgatcttgatcagtcattttttcagaaatggtagtcaacgcaatctgatgtgtctgaacattctccaacatccagatcatgctcttgctttcacctcttcgaaaggacgtaacatattcccaatcctagcggcagccggtgctttctttggtaaagtattccacagagtatcaaagtaacaaaaagttgtttctttcatgagcttccttactgtactctaactctgtcatttgatgtctctcaaccctgctctcatttctgcttatactacttttccagcttatttcactttaatgcctccacatgctttttagatggctttgcgaacttgaacttctagtatatttactagtgttttcagtcgaattatgcatgccatggaagtcttatagctgagagagactgcaacatgataattacacctaagttctttggcttgaagggatcttttatgcttgaacttcaagttgagtataaaatattctcacggtgaagtcttgctatggtttctccatggaattatgcatgtcatgaccaacttatagctgagcaagactgcagcatgataattacacctatgttctttggcttgaagggtgtctttatgtgtgaacttctagtgagttaaatattctcatgctgaagccttgttcctattttactctcatttgttacttcatacttgacaatatgccattttggctcatgagatacttcactacttttttatttgtacaagttacttttgcattgaacattagtaatttgcttgctttagtctctgatggagagtttgcctactggttattcaggcaagagaccattcagactttatctgccgcatgaaggattatatatctcggcaagaattcataaatagaaccatatctgcacttgacagccacttttctgtgacttctctggagcttaaatcatatgactgtcctgatgacacgaaattatgccctcctctagactgctgggaaaacaagaactggaggaaagttttgagtctgaatctgggaatgtcatacttcagtcactgtaactgctacaagataagaagaccttcgcttgaggtgctactgtatgtcaatgtaccttaattggttattcgtcgaggaataattttccctttttccatgagagtatttttgttggattgggctcctaatctggttgtggttgcctacctccaactcattcatgttgctacttcctcggataaaaattttaggaggaagtgctaccttttaccattgtgcgttacagggggcataattaagtccttgtttgtaagcacatcgattgagcgtttacattattaattcacaggacaaaccaccatctttacagatactgtttgtaatttgaccatctctctctccttcatttggttgtggctttatttcttgcagcaaaaggactttgctttaaaatgtgagttgcctagactttgattccaagagtttgttgtagctagtagtaggggtgggcatcggtcgaatcggtcggttattataaaaatacggttcggtttatcttttttcggttttgtaatattaataaccaaatcaaaccaaag

SEQ ID NO: 287 - DNA, 855 bp, Nicotiana tabacum
atgagttcaggaaatgtggggcggctgccattgatggatgttgttaaatttaagggagtgccaattctgcagcaattgcatttggaggaacggttgctcaggacttcacctcaaaactgttgcattgtaaatgatggaaccaatgaacccacaattgtcatgggtatttcaggaaaaccagctgaacttcttgaaatcggttctgttttgcaagacaagattccagtagtaaagaggtttactggaggaggcactgtaatagtcgatcacaggacagttttcatctccttcatattcaataaggatgttgtccctactgtacaaccatatcctaggcccatcatgtcatggagcagccaactctatagcaaggtgtttcaaggagttggggatttctctcttcatgaaaatgactacgtttttggcaaccgcaagtttgggggaaatgctcaatctatcacaaaaggccgttggatccatcatacatcctttctttgggattatgagatgatgaacatggcttatctcaaacttccaaaacgagctcctgactatcgacaggcaagagaccattcagactttatctgccgcatgaaggattatatatctcggcaagaattcataaatagaaccatatctgcacttgacagccacttttctgtgacttctctggagcttaaatcatatgactgtcctgatgacacgaaattatgccctcctctagactgctgggaaaacaagaactggaggaaagttttgagtctgaatctgggaatgtcatacttcagtcactgtaactgctacaagataagaagaccttcgcttgaggtgctactgtatgtcaatgtaccttaa

SEQ ID NO: 288 - protein, 284 aa, Nicotiana tabacum
MSSGNVGRLPLMDVVKFKGVPILQQLHLEERLLRTSPQNCCIVNDGTNEPTIVMGISGKPAELLEIGSVLQDKIPVVKRFTGGGTVIVDHRTVFISFIFNKDVVPTVQPYPRPIMSWSSQLYSKVFQGVGDFSLHENDYVFGNRKFGGNAQSITKGRWIHHTSFLWDYEMMNMAYLKLPKRAPDYRQARDHSDFICRMKDYISRQEFINRTISALDSHFSVTSLELKSYDCPDDTKLCPPLDCWENKNWRKVLSLNLGMSYFSHCNCYKIRRPSLEVLLYVNVP

SEQ ID NO: 289 - DNA, 4788 bp, Nicotiana tabacum
gttgagtaaagtcatttaactggaattggtcaagaagtctagttgctttgttaaagaaaaaggtcttttgtgagtgatttttcatttcaaactatcaaaattgttttatttgctgattttgagtcgagttgaaaaatggaggagaggtatgagccattgaaaaaacttggttctgggcattttggggtggctagacttgtcaaagacaagaaaacaaaggaacttgttgctgtcaaatatattgaaagaggacaaaaggtaattttccttattaagtattttgcttctaattcaatgattttccccttgtttggggaagtactgaatttattgtgttattatctgtttcaacacttctatttaaacatcgtaagcgcatatttataacatcaatttctacatgtaaatgtgtactaatgcttgctaggctgtttacattacaccgttagggcttcgaccctttttcggatcctgcgtgaatgtcggatgctttatgtatcggactgctcctttttttccgcatgtaaaaacgtttttgagcacttaatatttatccgctacttccaatcagctaaaccaagcggactcttactcgattgatctttctactgtactcttgtactggtgtctggttaagattgaaatttgtgccatttgctctttcaaatgaccaaatgtaggttgtattaagtttgattattacatgtttacaatctgaggtattataaagggagaagaggattttgatcacacttgaactttgcaagtggaaaaatacctttagctatccccccccccccaccaaacacacacaaccacttattaggagagttgttatttatttgtactaattattatgttaaactttttaaacagatacagattctttttcttatttcagattgatgagaatgttcagagggaaattataaatcatagatcattaaagcatcccaatattgtcagatttaaagaggtaaatacctactcttctattgctatgaatacttgattttattaaaacgaaaatgtccaaatcttcccttgtactattccaaattgtttaattttgctatcctttaaaattttggtcaatttatatccttgttattagcaaatcgtcttgtattgaccattatcattacttgagctgaaacgtgaaatggatggactccatgtgtccaaattcttcgagaaaaaaggattttatttacccctcaacttttgactatagtttaaaattatcacttaggttcgagctccaaaagaatcaagggcaataacaaaacttttataaggtggggtaatattaggtcaaaagtccaacggaggacaaagttgctcaaattcagatagtacttgggcaaatttgaccgttacttatgcaaatgcattttttttaatactaaactgagtcgagcgtctatcggaaataacctctctactttcctaaggtagggataaggtttgcatacacatttcgctccccagaccccacttgtgaggagccatttgcgtcgttgttaatttcacgtatggttattgaacgtgcgcgcttttgttgcaggttttgttaactccaacacatttagcaattgttatggaatatgcagcaggtggtgaactttttgctaaaatatgcagtgctggtagatttagtgaagatgaggttataaagatcttaaattccttatattatttctgtataaaaaatatgaaaatgttaatagtactatctatctaaacagcctctctgccatccagggtaggggtaaggtctacgtacatattaccctccccagactttatttgtgggatcccattgtgttgtttttatagtactaatcttcattcttgttttttcaaaaaaacaggctcgcttcttcttccaacagctaatatctggagttagttactgtcattcaatggtaaaattcataaattgaagtactttcgaattttgttatgtttgttattttttttcatgagttttttttttctttaggaaatttgtcacagggatttgaagttggagaatacactccttgatggaagtccaacgccacgtgtaaaaatatgcgattttggttattccaaggtttcttattttctgttacgaaattcgtcgctaatcttttctttagtaagataataggcagtaactatacattttctttgtcatatagtctggtttgttgcattcacaacccaagtcggctgttggaacaccggcttatattgcacctgaggtcctctcgcggaaggaatatgatgggaaggtacgaatactctttttagattattacaggaaaaaaaaaatgaaccttgagtttaacttaacagtcgaagactgactgcctttaccatataagaagagaacaactcattcttgttacactcacatttttcacatgcatatacatgtttcgtattgaaaatatcgggtttagttgaatccgaaactaataagctacatctgccactgtttcactggggacattatgctcatttgaaagttctatataagaagagaacaactcatacacgttacattcacgttttcaacacgtatatacatgttccgtatctgaaggagagctttggtgtaactggtaaagttgctgccatgtgaccaggaggtcacgggttcgagcggtggaaacaacctcttgcaaaaatgcaggttaaggcagacccgtgcgatccgacccttctccggaccctgcatataggggagcttagtgcaccaggctgctcttatatacatgttacatgtcgaaaatgtcaagttcagttgaatccgtagctaataagctacatccgccactgtttaattcactaggaacattctgttcatttgaaagttctatattttacagattgcagatgtgtggtcatgtggggtgacactatatgtgatgttagtaggagcatacccttttgaagatcctgaagatccaagaaattttcgtaaaaccattgaggttagtttatgaagtttttgatttgagttctcaactgatgttttaatattctgttaactgatacagtcaaatctttctataacagccgcgtttatttcgatattttttggatgctttagtgaaatgttgtcatagatgacatatattataacgtaacataaaaaatcggttcgagaaaaacttggcttttattttatagatcaaagaggtctgactgtatataattgttgtgtcatttagcagcttaaggatttatcctttctttttctttttcagagaataaagaatgctcagtactctataccagattatgtaagaatatctgctgaatgtagaaacctcatctctggaatttttgtcgcaaacccctccaaggtaactctcttttcttgaaatatgtcaaatgtgtacaaggttttagtgaaagattcataaattaggttgtttgtaatcaataacgcttcgttgaatatcatatataatattggaataagatgagtttaaatgaagcgacatggatggttaagagtcatacaacacccgacttgctttggaataagtagtggctttcacaacatttgggcaagcagtatcgtcttattgtcataattcggtgtttaagcagtttagttttggatgtcgtgattttaaggctttacttcatatcacaaaatgatttttttttacgtagtgtcggatggcttcccttgctaaagggtgtctccaccactggattaagacgtaatagtagtagtagttgttgtttcattgaatatcatatcacatgagaagtaagttctctttgttttgcatagttatttggggctagaactattcgtattgggcagaggcggacctatgcaataggtagagggtcactgacagtcgtaagttggacaagggcagacttaatgtacgagttggtatatgttaaaagttcactaaagaagtacaaataatatattcgaacctagtacatcaaatgagttgtgctagaattccaactcgatttcataaagttcaaatcctgaatccgtctctgcttttgacaacaaatgattgtacacacattgtgctattgatttggctttgcttaaattagcttttaaaaacatttcaattttcaatgtacagaggatcaccattccagaaataaagcaacattcctggttcctaaagaatctgtcaaaagaccttatggattgtgaaaattcaagatttgaagaaatttcagatcaaccacagcaacgcatggaagaaatattgcggataatacaagaggctaagacccccggagaagtgtcaaaacccgacgtgccaacagacgtcgatggcacggagggtgacctcgagtctgaaattgacacaagcgacgattttttggatcctcatagagagtgagtttaaaaatagaacgatatgaaatatcgagaattcatatagttgatcccgaattgaccggaataaagacgttgttgttgttgtagaagtagtatctgaaggtcacatggattaataaattgagtatgactagtaaatatgggatttactattgttgattgaatgatctttattactacttgataaaacttttcaaatataacggcttgattattcaataatgtcaattgtcaaagattgaaatccatacttcacttaagtcattaatcccatgtttcactgggttcgtttggtaggattttattagggaaaacgatatatgttttagctttagtattactaataccgtgtttggtagtattttccgttttatttttatatatagtaaaccatggccagtggc

SEQ ID NO: 290 - DNA, 1056 bp, Nicotiana tabacum
atggaggagaggtatgagccattgaaaaaacttggttctgggcattttggggtggctagacttgtcaaagacaagaaaacaaaggaacttgttgctgtcaaatatattgaaagaggacaaaagattgatgagaatgttcagagggaaattataaatcatagatcattaaagcatcccaatattgtcagatttaaagaggttttgttaactccaacacatttagcaattgttatggaatatgcagcaggtggtgaactttttgctaaaatatgcagtgctggtagatttagtgaagatgaggctcgcttcttcttccaacagctaatatctggagttagttactgtcattcaatggaaatttgtcacagggatttgaagttggagaatacactccttgatggaagtccaacgccacgtgtaaaaatatgcgattttggttattccaaggtttcttattttctgttacgaaattcgtcgctaatcttttctttatctggtttgttgcattcacaacccaagtcggctgttggaacaccggcttatattgcacctgaggtcctctcgcggaaggaatatgatgggaagattgcagatgtgtggtcatgtggggtgacactatatgtgatgttagtaggagcatacccttttgaagatcctgaagatccaagaaattttcgtaaaaccattgagagaataaagaatgctcagtactctataccagattatgtaagaatatctgctgaatgtagaaacctcatctctggaatttttgtcgcaaacccctccaagaggatcaccattccagaaataaagcaacattcctggttcctaaagaatctgtcaaaagaccttatggattgtgaaaattcaagatttgaagaaatttcagatcaaccacagcaacgcatggaagaaatattgcggataatacaagaggctaagacccccggagaagtgtcaaaacccgacgtgccaacagacgtcgatggcacggagggtgacctcgagtctgaaattgacacaagcgacgattttttggatcctcatagagagtga

SEQ ID NO: 291 - protein, 351 aa, Nicotiana tabacum
MEERYEPLKKLGSGHFGVARLVKDKKTKELVAVKYIERGQKIDENVQREIINHRSLKHPNIVRFKEVLLTPTHLAIVMEYAAGGELFAKICSAGRFSEDEARFFFQQLISGVSYCHSMEICHRDLKLENTLLDGSPTPRVKICDFGYSKVSYFLLRNSSLIFSLSGLLHSQPKSAVGTPAYIAPEVLSRKEYDGKIADVWSCGVTLYVMLVGAYPFEDPEDPRNFRKTIERIKNAQYSIPDYVRISAECRNLISGIFVANPSKRITIPEIKQHSWFLKNLSKDLMDCENSRFEEISDQPQQRMEEILRIIQEAKTPGEVSKPDVPTDVDGTEGDLESEIDTSDDFLDPHRE

SEQ ID NO: 292 - DNA, 1653 bp, Nicotiana tabacum
tggaactttatggttatagggaatatagagtgtggaaagtgaaatgggaaaatcatgggttatgttaatggccatattattggtcctatttttgttgaataatttagaattgaaaattatggcaagtgcaaaattgagtgaaacagcatgtaaagaagagagacgaattggtataaattcttgtaaacctgttttgtatggaaaacttccttctcctatgtgttgtgaacgtgttagggttactcatattgaatgtgtttgtagtgttattactcctaaattggctgctcttattgatatcagtcgtgctattcgtcttgttgaaggttgtggtcgaagagtccctcgaaaattcaagtgtggaagtaagttaatctttttttctgtttcgtctctcttctgttagagatgaattcaggatttaaatatatgtttcgacttaatcagtatatattttgtatgtataaagttaatctcaagtggatgagttagatttagtatcttcttatctgtaggtttcttttactattatgttgtttcttttgcttctgctattttatcatcttattttgcaattgttttgtgtatttatttgtttcttagcctcatatctccatatttgtcttgttatttcttatcttccgttgttactactttttatttctgcttattttatatattttctttattgagttgagagtctatcggaaacagtctctctatcttcataggatatggtaaggtctgcgtacactttaccctctctaaatcctaagtgtgagatttattattgttattttattggataaattagaatcttgagaaagtctctcatttatctatcaatcattatagacaatctcatccatgttatttatatatatatatatatatatatatatatatatatatatatataatatatatatatatatattttattaatatgaatggaattttgcgaactttgggttgaactagagcagaattttgagatcttcgaatagaattaaggatttaatgttactgttacaacaagtaaagattaaatattgctcagctttactttgatattctaagaagtccttcaatagttaaaaaaaaaagtttggtcactaagcttccgttatgtgcggggtcgggggaagagccagaccacaaagatctattatatgcagttttaccatgtaattctgtaagagactatttttacggctcgaacccgtgacctcttggtcacatgacaacaattttattagttacgccaagattttgcatgtttcttgaaaagttctcgataatttgattgactataattgttgtagctgaaattcgtttattttttcttttgttgttaactacttactctaaatttgcaggtattaccacaccaccataaggaatatagtcagcttaattggcttgctgcttggtgtttcttctcctactttagttaataattaagttttaatcctctaagctgtttatgattagtactaatgtattaatatatagatggttcttcagttggaattaaatcagagaggagaatataatatgagtttaagttattaatgtatcgacgtattttcacctattatataagattgctttccatttttcttaatgttgccgattaatatttgtctttta

SEQ ID NO: 293 - DNA, 342 bp, Nicotiana tabacum
atgggaaaatcatgggttatgttaatggccatattattggtcctatttttgttgaataatttagaattgaaaattatggcaagtgcaaaattgagtgaaacagcatgtaaagaagagagacgaattggtataaattcttgtaaacctgttttgtatggaaaacttccttctcctatgtgttgtgaacgtgttagggttactcatattgaatgtgtttgtagtgttattactcctaaattggctgctcttattgatatcagtcgtgctattcgtcttgttgaaggttgtggtcgaagagtccctcgaaaattcaagtgtggaagtattaccacaccaccataa

SEQ ID NO: 294 - protein, 113 aa, Nicotiana tabacum
MGKSWVMLMAILLVLFLLNNLELKIMASAKLSETACKEERRIGINSCKPVLYGKLPSPMCCERVRVTHIECVCSVITPKLAALIDISRAIRLVEGCGRRVPRKFKCGSITTPP

SEQ ID NO: 295 - DNA, 15962 bp, Nicotiana tabacum
cttttttaattcctaaaataaccgaaatatcatagtcggtctaaaggagatctgtacctttgggggcatattagtccactcattcttttattctctccagatacaaagaagaaaaggaacttggtaaatctttgggccgacttagggtttgacgccaccattccctggagaaggaggaaatcggaggaggcaaaattcattcgtcgacttctttcatctttatgtaaatccctcgatctttgatctgtgtgaaaattcagtttttttttgaagtattctcgtctttatttcatatacgatacatgcatttttttttgttgttgtgtgtgtgtgtgtttgtcttgtttaatgttattatatctaatatatgtgtgtggatgttagaatacattgtgttttattgttagtagtgaatatatgatgttttatggtgttaaaggtgaaggctctgttatttcgtttatcgtagtcgtgattggctactgagcacttgtaatttgtcgaacaaactggtgaatgatcattcatgttcctgaaaatggaatattttcatctaaatggcattgagaatataaagttttagctttttttaaattgatgaattggtttagatgtttagtaacttacgacgttcttttaacattatattgaattaaaaaatctgttttacttattgtgtgttggagtttatgtcattggggcgttagttcctttagcttttattgctgatatcgattaagaactgtactcggacgcacttttgggcatgttgtggtagatcatcattcatgatgatcttttgtttataaccaagaagttttcaacaaatacttcacatcctgcaaacaacaacaaccaccacccagtataatcccactagtggagtctggggagggtagtgtgtacgcagaacttacccctaccctgaggtagagaggctgtttccgatagaccctcggttccctccatccaagaactccccaccttgctcttggggtgactcgaactcacaacctcttggttggaagtggagggtgctcaccactagagcaacccactcttgtcaaatacttcacatcctgccttggccgaaaatgccacctacacccccaagaagcccttttgtgactttttggatgggaaatgaagtgaacttgcccaacaaggcgggaatgtattagtaaaggaccggagagaacttgaatttttgaatctacaccatctgtatagatatcatcatctacatccagaaagccgtatgctttggaaaaagcttgtatagtttgtaaaggggtctccgagggctaggtcatcacgggtgatgttatgtaatttcgtcgcatttcctacacttttgcatgcatatgttcagattatggtcattatgtttttgcctgtcctttaggttcaatttcttcacactaaggtttcagcattagctttcggactctaaaatttagtatttaggatagtgattttcttagtgtatttcttgggagtcaagatgctgctgtattgatcatatttattcccaaaatggtggaatgtttggtgggtagtgtctattttttggaattatttggtgttgattttacattttgggatatttcattagggtgtatttggtgacatacctattggttcttattaataaattttggtttctttagaagaaacgatcacatgccaaaacttcaagacaaagacatatatcatggagatgaatccaatgtgccaaaatataaagtttgtacctatttgtacttaaatcaagatattagatattatgcatgttaaaggtttcttaaaaacaaatggtgcctgcatgtcgacggaggtatgttgtactttttagcgtggtacaaggtcctctccagacttctccctcgtctaacttcattggtagcatttatggatattttttaattgattcaccgtggtggggatttggaagtttatgagcaaagatgaatgttatcggttgttcttgtttatattggttggaagaatcctcttcaagccattatgtcaagagttcgagcgtggtacttttctaacaaaaatgagtagagacgaaggtttaagatcatagacgtgttacgatccaattttagtttattatttttaggacatgatgatcaaagaagattgtaggtgagatatctatatatttagaaattcaagaggataatttgaaccttccccacgttttagtaatagttgaaggaatgcattgggtgataagggattgtttatcggcacttgagcttattttacttctgaaatcttgcccaaggccgtggtatttatgtgtaattgtatttaactcaacccatccaaccctctaacacaagtagacaccaaggaacaattatagacctcttacatgtaaagtttaaatgcgtaaaatgtgtactcactagtataatatcttatgtgtttgacaatcatctaccttatttggtgaattaaggaagtaattttctcgaactataccgtgcaaataattcacattccaaacgatctcgatctaactatgacgagtctgcacttcaatacatcaacttgtcagtggattcaactaattctttgaggaggtactcttcgctttctcctattttctttatatatgtatttttaattgacgttgcttttattccttttgcgtatttctcctttgtatcatgaaaagatgacattctctagctaagtatatcatacacaaaatgctttctagttttaataattattgtttagttattgacatgtagttgtttcatacacaatcactaatctattggaatgtaagaataaggtcagatatcactcctttaaaattagcacgacttctctctttttctttacctatattagttgttaagctcctttgtttcccatttcatattttaatttactaattaaatcttgaatttagagtaatatattaaagttaaagcgatgcataaatgtgcacgtgttatttgaaaatttgaatatacaaacagaagtttttgggaaatatgaatagaagttattaggacatataagattaataatttaggatgtattaaattgttgatgctttttatgatccttgggaaaggcttcggcagaagggtagttttgttattttactagctctatccaaattcttggattgtcactccacattgaatgttgtatacaattgtaccaggacatcggtataaaatttacttacaacaaaaataaaggtgcaaacaactaaatgaaggataaagtaatactgaacttcatactgatataattttcgtgttttgagtaactcaaaaaaaaaaactaaatgaaatggcaagagcagcattgctacaacctaagctgcaaggttgttagatgagtgtatgtaaaggtattgtagagccctgaaatgctgtcttgtcaccagtgattttgaaagcgtgaagcggaaaaaagcgacaagggcccgcctcgcttaaagcgtgaagcaaggtgctcactttattgaagtgaggtgcaatttcaaaataatattaaaatgaacattgctcaaataaatataataactaaataaaccagaattctaacaaaaataatatatattttttattttaaaccaaaatataagtggatcaacagttattcatattaaaaatggataaaatagaagaagtcattagcctttagtaataatttaaaaaatagaagctaccggctcaaaaacagaaataaaaaatagagagatacagagaaaagggaaaataagaaaataattttttttaaaataagctgccaaatgtaactggaaaaaaaattaaaatccccatatcgaataccatagcgagggaggagggaggagggaggagggaagaagaacctggagttgatacttttttagcaagaagcggcagccaattttgaacccaaattgcgacttctagtcccaacctgaactcttcttctcctttattttattcttaaaaaagagtcaccaacttccttttttcttcttaaattatcccttttgaagaagcgctcgccttgcgtcgtcattgcttcacgctgagcgcttccgcctaagaagcaagtgctttcttcaccccgcttcgccttagactcaaaaagtcgatagcttagcaagaatcgacagccaatttcgaacccaaatgagcgacttgttctgaaatagtccaatagtcccaatctggactctccttatttttttgttaaaagagtcatgtcgacttcttttttttcctttctaaaattgtcgctttttaaagaagcgctcgcctcgcatcttcatcgcttcatgctctgcctaagaagcgagcgcttcctacagcccacttttcctcagactcaaaaagttgatacttcctttgttccagtttatgtgaacctatttcctttttggtccggtccaaaaagaatgacccctttctaaacttggtaataatttagcttaaacttacaattgtacccttaataagaaacttttataaccacccaaatactctgggccctttttgacttgtttaggatcacaaatttcaaaagtcgtcattttttctttaactccgtgttcagtcaaacaagttcacataaattggaacggagggagtagttctttagcaagaagcaattgccaacttcggacccaaaggattgacttcttttgaaatagtcccaacctggactatcattctcctttatttttatttttttaaaaaagagtcccgaactttctttgttcttctaaaattgtcgttttttaacgaagcgctcgctttgggtcttcgtcacttcacacttctactaagctaataagtgagcgcttcctttaacccgcctaacattggactcaaaaaccgacctcccatcgcctcgcttcgcttcacgctaaaagtgctgaagcacttgctttccccaacactacttctcacaatgttaattagttgtaaatatcactaaaaccttttgaaacgtcattatgcaaaaacttgttactcaaaaaaggccatttagaatgcctttctggagaactagattattgtcctgcacttcattggctagtgatcaatcaactagaccaaatctcaaatttgttagggtaatatatatgaatcggcgtcaaatttaatttttccagctccatactacgcaaatttgtctcgtttccttttgacaccttcaatgaccgtagtttcttgtatttagaccagtgctttttggtgtttcatgtaatgtaggagagattctacaccttttggttgatttgatcatttctaatttgatctacttgtttgatatatttatcttgtgggtactagttgtactcaactcttggcgccccaacattcactccgtatagtagttttggtctcataagcgtctaacatctttcattttattaggtatcttcaaatggtgtagtacctctgtaataagtttttgtcctattggtgtttttaaaagcgaagaacacaaaaaaattgacaagtttcatgggcttgaatcaaaaagcgagacgtagcgcactcttctttatagtaagcgaacaattcacgacataaaagatacctcttcaagactcggggaaagaatagttgtacctgtacttaagtctcagtggaatctaaagcatcaagcgttgattttttccacgtggtaaggccctaggaacatcactattcaagaagcagatgcattttagtttagttggtgttgtatgtgcgaggtctttcggacaacatttaggttctaccgacggaaattttggcccccgctcgaggagcaacaatacggatgaagggagaaaaagttatgaaagaacacatttttacacctttttggttattataaataataagagcaatttcttggagttgggagcttgttggatcggtcaaaagttatttttatttttgttcttgttgtgtatagtggagatgcctgcttgtatagatagatggttaggattttgggaaggattagcgtatatataacataattagttttatgtaatgcttaatattaatcttgcaatctttacatcctacaccatctaggtgtcctataatgtaactcttcaacttatccaaaaaaaagggtccacataatagcgcattgcgggcaccatatttgcttcaaaatactgatggtagatgtacgttggaagtgatgaccattaaaatatttacaccctttgattaacaccttcccataaacataccatgtgcgatgtgtcaatgtgtttgtctctcaaacaacatctcaaacaacatgattgatcttttgctatatggaaaaatcgattgtaacatgagtaaaaatgggttgtgaaagcacccaaggatttgtcttagtggtcaatgaagtgggttgagaactctatgaggtctcaaatttaaatccgagcggaggcaaacacactaggtgatttctttccatctgtccaagccttggtggacagagttacccgatacctatggtggtggaaggtagcaggtaccctgtggaattagtcgaggtgcgagcaagctggtacggacatcacaattataaaaaaaaatgggttgtgaaatgagtcatctctccaatttgaattcgatgtgggtaatgcgcttagttgttttttatgattgagaaatctgtttggagccaacccttgggaccaaagattacttttgatactcggggataatggccccctcctctacccttctccactcaggtgccaatcttagttagcatgacgtaaggttctgagctgtgatagtccctcaatctttgccacttgaactaagccttggtggctgatagggttaattgtcttctcatttaataattttaagcatgtttaaagtttgaggtatactaatatagaaagattaaccattagaggatcaagatatttgctgcatattttcgttttatatttttcctaaggctatctttgctcgtgtttatgaggaccaaaattgtctttgcagcaaaatacaaatgatattatcaaaaagagcccctttcttgcacacttatttagtttttcctctttttttttggatgaagttagagagttttactaaatgacattaagaagatgcataacaaaaattactacggaaagggagcgtctgctcataccaaaacaaactggacaactaaggaacagataaaattcagaaaaagttcaacactagttacatgggcctgactgaaccaactaaataaattattaattaaagaagtggctttaagagtatggtatcggatgctaaccaaaaaaaacgagtggtatcggagttgaaatcccatcaaaatatttatgattcctttaatactccacaaaatagcaccaagaactatttgccaaatttttttgactgattgcccaactcttcctgagcaccagctctcataagcttccttgatactgttgacatgacccaagcaattccaaaaactgaaaaaaaaaaacactccaaatttcagctgctacttaacagtgcagaaaaaatgccttacactcttagactccatttggcacatataacatctattcacagtccatatgctcctaagattgtcttgagtaagacaagcttcatacaaggttgtccagataaacctagctacttttgtactcgggtccacgtttagttgtccacttttgattttgactttacatgccccttaagaaataataattgtagtatatattttatcatataacccctaataatgatagtatttaaaaaagtattgagaaatgatttgaggaatgagtagttaatgataagggtaaaataagaaacgaagattgtctttctattgatttggtaaaatggacaagtaaaagtgaaagtgtatttttggtgtaatggacaagtaaaagtggacatgtatttttggtgtaatggacaagtaaaaatgaacggagggagtaggtagtttggtttttcatataagcttccatggccatttgatgatcagttccttgttggagcatgctaggttctctcttttgattcaccccattccaacctatcttgcacctgggagttgacgttagcacctgaaatttgtcgagcaaacccagcagatcatttaacttccagtcttggatgtcccttctgatgaggggcccaagcactatcttcctaataatgtgagatagttgcatcaatacaacaagacattttgttgggagtatgttccttttgttatgaattgtgatgaatgtgatccaatgtctactatttgatgataagatggcaattgttttccatgtgtgcttataattgtttgggttggtgcaatatcgaagctcttctcaaggaaaaaactgccagcattttcttggttttgtggatctaacattatctggtatgtggtaccatatagagcatcttgtttgactgtttttcgaggaaacaattgtgtctagtatgctagaaaccttgggaacggcacttgcctgtggccttgtaaggattttgtttcattttccctttggggactgatccatatttagaccttcaacctgatctcaaaacgttggatctcgactttactcttaagaaaacaagatgaatcaagtcgtattaaaaatccaaattggcgttctcaagctctatgtttttgctgataaactagaaatttccgagggcagtggcaaacggtttgaaattcagtggataatggtccgcctctgtctcaagctctatcttgagctttgaatgtatgttgatttctcggcattatgcattttcagcttaatctttgaaagtttgaatgtttcctgtgtgatggcttactcctgtagttctcttggtcctcactggagtttttggtattgtacttttctgtggttcttacaaattttgcaggtggatagactctatatttgtatgcttctttctgttaaagtgctgattgttactgatgtagactaatgctagaaacttttccttaaaggattacaacttgcaacccttttgtgatcatggataattatcttagcgggctccatatgctagtcgaatgactgaagtaccaatattgcggagtagtttcagcgcatacatgtactcatcccagtgccagcttgtcagcttttagatggttggactgacagtttatattcggttttcctagtggacttgtatgcgatgattagtttgtggtattctagaaatagtgatgcgcgacctattatttaacctatgatcctgttattgatgatgtctcactattttgtcagggtttatcaaactcaaccaatggcatgcgcgtggtctctctgaggcagaaccaagaccgagttgtatataactgctatctttgaacctttggctttaaaccagcggatagggattgatcctgtaggtagaaatggaaacaaaatacggaaaggtattggataggagccaaaacattgttgttgacttgaagagaaaacgggtggctcgatgcgagacccatctctccggggctacccacatgatatttccagtccgatcctcgctgaactcatccatccgccctcttggaaagcggaggaagcttaatggatcaaacagcacgtgtggtggttgtgcgtttcacccaagagaatctttgcgtagatattatctcaatttcaggaaaagtgggcttccacaacgtttgatgtactatcagaagggtcagtggactgatttccctgagaacattgttacaatggctaagaaaaatctccggataaagaaatcagtgacagaggtggagttcaatggtaaaaaatttgtgcttgatttcttccatatgttgcggttggacctgaagtcaggtctgcaacaacctattgcatggattgatgaagcaggcaattgctttttcccggaattatttgctaattgtgatgaactgcatgagtgttgtcacagtgaacacaaggactccatagaggtagattctgagacagagggatccaatgatctggagatgcagctggagattgaaattaatggagcggatatgtcaagtttgaaggaatctagtggagagtccaatgctattgttaagcaagttaacttatgtcacaaacctgcagcaaaaaattgcactgcagaagttggtgataattgtgtcagagtctcagatacgaaatccaaggatgactccgcggaaaatcatcaattggtggaatatgctgcgggctgcaagtgggaatatctggacccagatgttgtgggtgagatatttctcaagggtatcaattcaccttctggtgcaaagatatttgaattacatcgtgtttcaagtactttcatggaagttcgaagggaactctttcaaaagcaggtggaaattacgaagaagcagcgtgggggtgccagtcttagttgtgcttggcttccttcttctaaaggaatgattacgaatattatgaaatatgggcttgctaattatgatctatccaaatccaagtccagatatggcgttggtgttcatcttttccctgctaactgtactgagatcaggtagtgttgtttcctcttttgcttttttcaatcaactgaattttcgagcaacatggccaaagttgcaagaagacacatacaggtgcattttagaaataatgattttcggtcggtagagcatataggttttcgagcaacatggccaaagcggtgaacttttttatgagaacagtggggtagtggcaacattcaaacctcaaggtttggggtaatctgaatcttccctataattttgctggtaaaacagactgaatgcttgtcgtgctgtatgtctctaaaatgctatacagattcagatctggaaaagtaggaccagtctaatgtatattgatttcattttttgtttactcaatttataattttccccagtgtatatcatcagtgataggaatatgaatcaagtttgaaagtggcagttactgctttctgtttttttcttccggtatggtacctgactgtttcctgtaggattgtttgattgcattgccaagttgatctctattgctggtatccaggttcaaatactagatttttttgggtcttgtcacagcttttacgacctttcacggtagtttcctaagaagctccatgaattgattccttagtgcttgtcaaatgagtaatgacataagtcgcttttaaaagatgcaaatattgacctgtgttatgcgttgatataactctgggtttactagtttcatgttgttgtagaggaatttcatgtggaatgtttgatgatatgctatgctagtcttgtgtgttattattttgtgtcttgaaatttcacttgttctagtcgtcttgtgagatttgataagatgtcttttgatgcgtaaaggagcttgttatagttggtcgcttctcttttgatgctttgaagtttatgccttttgtggctgacctgccatgatcgtattttcctttttgtcgatttgtttgttctcattatgaagcttattgatgttgttgctttcatttctttacagtgcaaagtattgtgattatgacgaaaatggtgtacaacacatgatattgtgccgtgtaataatgggaaacatggaattggtttatcctggatctaagcagttccatcccagtagtgaggatttcgataatggcgttgataatcttgaaaatccgaagtgttatgtggtctggactatgaatatgaatactcatatctttccagaatatgttgtcagtttcaagttgtctcctgatgctgaaggtgataatttaagtcctttcctttatggttactgtttgcataagtcaaaggaaagttattccccttagctagctcgtgttaaatgttcatgaatccgtctcttaaatactccaacagtttattggctgctcggggagggacggatgttgttcatttttgcagataaggaagtaaaagatccttccagctttgttcgaatattcgtccgccccttccaacttttgaaatcatcaaattcatccccatttcttaatttttgtgggtgataggacaataaacaataaatattttatacttgttagtgcttatcagtgttatagcatttgtatttgttattttatgtccatgttaatcctgtttagacgattcctaggattgcctttaccaacattattgtatttttcatttaacgtactacttttgttcatattgtactgaatatttcatgtaaagattgattcttaatgtgttaatctctacatgttggttaatgatgggaattgagagctgggttaatatgactaattctaatgttctaaaattttgggagggactgcaaatttgattagtgttggatggaatttgatttgtaaaagtttgagggcaattgagttacgggatttttggttttcagtgttctgcaatttagacctgcctaggttcttgaatgcctgttaatttttttttttttttttttttttgtgtgcctttttttgtctgccttcctctaactgcagtttttattgtgtttggcgttgtacagataaattatgcgcctttctcttttgacattttaaatttgaggaatacttgatagatattgttttacaaaataatgtagccgttgaattatctttaccatgtttgcccttacaggatatcttgttggaaacgagagcccaattgatgtctctgctgtcagtacttgttgtaatcaggtaccggcagatacacttcctactgacttggtaagtctattgacagctataaataatttgactgctgatttatgtttttggtcttgattgaaccaaaagatggggtaagttggaggattttattggatatgaagcacatgcgaaatagtttggcagatgaggcagtaaaactaggattttgaaaaaactttgagagggagtcgagcaacacagagggagttcttccaactcaaggaccacctcgtgaatttcttggcaaaataagcaaatgtataagggcagcctcctactttaagatgtttgtgcaaatattagcacctccaatcatctcctgtttatattcctcaattgcatgctagttctgtaggggacacaattgacttcataagcattgccctagtgctaccttggatacttgagatagtgtgtggcgcatgccactacagaatacatgctgctaccttggatacttgagatagtgtttggcgcatgccactacagaatacatgctgtcacctggaatctgcataagctactggagacggttattatttcaatgcacatgcttaaagaactcttatttatgttaacaatgtatataaataattgctgcaggtttttttgtacatatacttagatcttgaactcagttccaataattgctgatactgaagttgttggtttctaaacccagcttcctgattcctatcctgacagttgtttagttgtacttcatccagcaagccttacttgatccaaatagaggagagtgaatgacgtgctagtatggcgattctgcttcttcagcaacattctcattttagtggtcatcttttcatcaactttgtggagttccttaaagctaacaattactgtgtgttcttatagggaactgacggctatcagaattcactggggttggcctcgaaaaaggctgcaagaatgccaaagtccccttggatgccattccccatgttgtttgcagcaatttcgaggaaagtgcctcaagaggacatgaacctcgttagtagcaattatgagttattcaaggtatatatattgcatctgctgaaaattgcatatcagaaaaaagtaacaattgctgaatgttttatttctctaatttgtgcctggattgttactgaactgaaaatttttcctcttgtttcatttatctgacatcgataggacaagaagataagtcgggatgaatttgtcagaaagttgaggttgatcgtaggggatactttgttaaggtccacaataacgagtcttcagtgcaaggtatggtctttgctttttctaaagaaataggtgcagctgctgtgctagctggtcgatgcttcattcataatatcataccctgtccatttaagaatttttctctatgttgcttatccaaatgttgagttagattttggttagacagacttccacacaatctttggaaaaatgttcatttgggtccaactagtagcaatttcaactgggtttgcacattttatcttttcgtaaggcgacgttaagtgtttcacattggttaagggataagttgttatctccgtgtatgtcttgctcaatcctcactttatgggctagcttgtgggttgagtaaggcttaaggtccattttttcattacatgttatcggagtcttgacgtatccctattcctggtttaccaaatgttgggcttccaatgttatatggttcatgcaccctgatgtctattattggttgctgttaaggactgtagtcaatgtctaaaccggcttccacaaaatcctaggtcgccactggctcattatttaaaactctcttatgtgaattttactgctttgaatgtttacaatagcattggggtcgtgcgactcgggttcctcttagcagtctttgtgctaaggactgctttcattgttaataaaatacctgttatcttgttcaaaataaatgtttactaagtatgaaatggacaacattagaaaaaccaaccactaaattgaatttgacatattatagtctatatcttataattataaggtacgattgttataattacattaggggggcctaacaatggagcatatttgttagttcgatgtagtgcataaaagtcgaaggaaatatgctgcaacttagttgcaaaagatttatataatcataaaatatcgaaaatatatgggatcataacatatatgataacaaaattttcttgaatctaagtagccattaggaagtcaatgtgaacaaagatatcttctgtacttttaagtggtaggttactcaatattggatgtttttccgtctataaatagttcctatcgttggtctgatttgacactaatgtcgtcgttggtcgacttgcgtacgtgtgtaattgttcagttctaatctttgttggcacaagtatatggtgcttataaaagagtggatttccctaggattctttgaattgatggcttaagatatttgatatgcatcatattgagatgcgtaatgagggacagttgctcatctcgtagcatcggatgctttactaacattgaaccacaatatatattatatgattgcggaaaatttaagaaactgcatcggatgtttgtatgtttcttaaaatatgaacatcagaaactttaaaactggaaatttctagtttcccatacactctatgtcccatagtgtaagcagaattgcttggagagctggatacgttactgagtgcattatttcggtttcatttatttttctttgaagacttccttttggtgctatttcgcaggtgccacctaaatcaatggaattggtccccgtaaagcaagagcaggagagtgtctgcctggagtgaaggcttctagtgtttgcttctatgaacagctgttttttcttagctatataacaagtggatagagtagacgtcgctgttgctttttccttgaatgtcggatcgcgtagccccgttcatcttcggcgcaagagcgctcgattagacataatataggttgctactttttgtgaaaatgtgttacgtgcgtttagctttcacctatccagaatctacagagttctgggatttgatagatgaagtgagcgcataaaaacttgcacatttcaggtttctatctcccttatattttggcaagtggtacgtctgtgtcaagtgtgttgtagagttcatactgaagttgcttgtttgtactcttaaacggttatgactatgcttgaaaattgggcgttacctggtgtttctgtgttgactatgcatgaaaaaattg

SEQ ID NO: 296 - DNA, 1788 bp, Nicotiana tabacum
atggaaacaaaatacggaaaggtattggataggagccaaaacattgttgttgacttgaagagaaaacgggtggctcgatgcgagacccatctctccggggctacccacatgatatttccagtccgatcctcgctgaactcatccatccgccctcttggaaagcggaggaagcttaatggatcaaacagcacgtgtggtggttgtgcgtttcacccaagagaatctttgcgtagatattatctcaatttcaggaaaagtgggcttccacaacgtttgatgtactatcagaagggtcagtggactgatttccctgagaacattgttacaatggctaagaaaaatctccggataaagaaatcagtgacagaggtggagttcaatggtaaaaaatttgtgcttgatttcttccatatgttgcggttggacctgaagtcaggtctgcaacaacctattgcatggattgatgaagcaggcaattgctttttcccggaattatttgctaattgtgatgaactgcatgagtgttgtcacagtgaacacaaggactccatagaggtagattctgagacagagggatccaatgatctggagatgcagctggagattgaaattaatggagcggatatgtcaagtttgaaggaatctagtggagagtccaatgctattgttaagcaagttaacttatgtcacaaacctgcagcaaaaaattgcactgcagaagttggtgataattgtgtcagagtctcagatacgaaatccaaggatgactccgcggaaaatcatcaattggtggaatatgctgcgggctgcaagtgggaatatctggacccagatgttgtgggtgagatatttctcaagggtatcaattcaccttctggtgcaaagatatttgaattacatcgtgtttcaagtactttcatggaagttcgaagggaactctttcaaaagcaggtggaaattacgaagaagcagcgtgggggtgccagtcttagttgtgcttggcttccttcttctaaaggaatgattacgaatattatgaaatatgggcttgctaattatgatctatccaaatccaagtccagatatggcgttggtgttcatcttttccctgctaactgtactgagatcagtgcaaagtattgtgattatgacgaaaatggtgtacaacacatgatattgtgccgtgtaataatgggaaacatggaattggtttatcctggatctaagcagttccatcccagtagtgaggatttcgataatggcgttgataatcttgaaaatccgaagtgttatgtggtctggactatgaatatgaatactcatatctttccagaatatgttgtcagtttcaagttgtctcctgatgctgaaggatatcttgttggaaacgagagcccaattgatgtctctgctgtcagtacttgttgtaatcaggtaccggcagatacacttcctactgacttgggaactgacggctatcagaattcactggggttggcctcgaaaaaggctgcaagaatgccaaagtccccttggatgccattccccatgttgtttgcagcaatttcgaggaaagtgcctcaagaggacatgaacctcgttagtagcaattatgagttattcaaggacaagaagataagtcgggatgaatttgtcagaaagttgaggttgatcgtaggggatactttgttaaggtccacaataacgagtcttcagtgcaaggtgccacctaaatcaatggaattggtccccgtaaagcaagagcaggagagtgtctgcctggagtga

SEQ ID NO: 297 - protein, 595 aa, Nicotiana tabacum
METKYGKVLDRSQNIVVDLKRKRVARCETHLSGATHMIFPVRSSLNSSIRPLGKRRKLNGSNSTCGGCAFHPRESLRRYYLNFRKSGLPQRLMYYQKGQWTDFPENIVTMAKKNLRIKKSVTEVEFNGKKFVLDFFHMLRLDLKSGLQQPIAWIDEAGNCFFPELFANCDELHECCHSEHKDSIEVDSETEGSNDLEMQLEIEINGADMSSLKESSGESNAIVKQVNLCHKPAAKNCTAEVGDNCVRVSDTKSKDDSAENHQLVEYAAGCKWEYLDPDVVGEIFLKGINSPSGAKIFELHRVSSTFMEVRRELFQKQVEITKKQRGGASLSCAWLPSSKGMITNIMKYGLANYDLSKSKSRYGVGVHLFPANCTEISAKYCDYDENGVQHMILCRVIMGNMELVYPGSKQFHPSSEDFDNGVDNLENPKCYVVWTMNMNTHIFPEYVVSFKLSPDAEGYLVGNESPIDVSAVSTCCNQVPADTLPTDLGTDGYQNSLGLASKKAARMPKSPWMPFPMLFAAISRKVPQEDMNLVSSNYELFKDKKISRDEFVRKLRLIVGDTLLRSTITSLQCKVPPKSMELVPVKQEQESVCLE

SEQ ID NO: 298 - DNA, 121 bp, Nicotiana tabacum
tcgaacagtcgataagaaataactacagcataagtaatttcaacattactaatataacccrttcagtactattcttacacaccctaccaaacgactttggtggaatcatttagttcgcaga

SEQ ID NO: 299 - DNA, 121 bp, Nicotiana tabacum
accaccggatcttatagtgatggcacctaagaaatgaaagaggattgtcggccccaataarccgaattgatttatttgtaagaagcaccacttaggtttatgttggatgactcttgaaata

SEQ ID NO: 300 - DNA, 22 bp, Artificial Sequence
  Primer
gctgctacagccacttctccca

SEQ ID NO: 301 - DNA, 27 bp, Artificial Sequence
  Primer
ccacaaatgtagaggttaaagggggtc

SEQ ID NO: 302 - DNA, 24 bp, Artificial Sequence
  Primer
aatccgcctatttgacaccccttt

SEQ ID NO: 303 - DNA, 36 bp, Artificial Sequence
  Primer
cgactcatcaataatttaataatttcataaagcatc

SEQ ID NO: 304 - DNA, 40 bp, Artificial Sequence
  Primer
gttaattgcttaagagatgaagcaatgcgaagcatgttgc

SEQ ID NO: 305 - DNA, 20 bp, Artificial Sequence
  Primer
ccaaagtcattttccccttc

SEQ ID NO: 306 - DNA, 30 bp, Artificial Sequence
  Primer
aaactctcaactagtctcttgcagcaagta

SEQ ID NO: 307 - DNA, 19 bp, Artificial Sequence
  Primer
cgcccactttgccttaaat

SEQ ID NO: 308 - DNA, 23 bp, Artificial Sequence
  Primer
catttctgcagaactgagcctac

SEQ ID NO: 309 - DNA, 24 bp, Artificial Sequence
  Primer
cggtgggtaatacaatgaagagag

SEQ ID NO: 310 - DNA, 121 bp, Nicotiana tabacum
ccgaggggctcgcgaaatccacaacagacgattgccaaaatatggcatacgtccacccttygcgagccccatcgattaaagtctggagtcgctgttgcagtgactcttggttgaaatatgg

SEQ ID NO: 311 - DNA, 121 bp, Nicotiana tabacum; identical to SEQ ID NO: 298

SEQ ID NO: 312 - DNA, 121 bp, Nicotiana tabacum; identical to SEQ ID NO: 299

SEQ ID NO: 313 - DNA, 101 bp, Nicotiana tabacum
taccaaaaagaattacatttgatgtaaagaggattacactgaacaactacwtattttcgtttattagaaaatggactttcattcattatcattagtacaca

SEQ ID NO: 314 - DNA, 101 bp, Nicotiana tabacum
ttgtagagaggggatttttctgataagcatatgctatattctaccaaaagmtcaataatactttacttttcctgcttatttgcattgttcttactgactct

SEQ ID NO: 315 - DNA, 101 bp, Nicotiana tabacum
gtgagacagttgtgtaattgaattgatccatgcatctaatactgacttgtytgattctttgttcttatcaaaatcattaaaaatggtagataatggtgtta

SEQ ID NO: 316 - DNA, 101 bp, Nicotiana tabacum
ttccatcagcgatacccgcaataaggggagcgaggccacgctggtccacgrcagccgatatccgcgacatgtttgggaggcgactcctgattatgctgaag

SEQ ID NO: 317 - DNA, 101 bp, Nicotiana tabacum
caacaacttgggcggatgttcacaactggtacaaatctaagataaaaattraagatgatcagctcggtttcccagcgtcatccgagggtcgggtccgggag

SEQ ID NO: 318 - DNA, 101 bp, Nicotiana tabacum
agaatcttatcaggtatggagatattttcaggtaccaaaagaaaacggacrcaacaaagtccacagggaagaacttgaacaagtcgcatagtttgaaaagt

SEQ ID NO: 319 - DNA, 101 bp, Nicotiana tabacum
ttcatgcgacgtcatggtacgtaggcaatctacatagagttcgatcgaatyatttttttatttattaaaagaaaaaaaggaaaaaagaaaaacagataaaa

SEQ ID NO: 320 - DNA, 101 bp, Nicotiana tabacum
tttcattttgatgtaataacaggatcgcaaaccggaacctcgacggaacarcacctcaatcggctctccacctcggtaaactccgtcactcttcctacttc

SEQ ID NO: 321 - DNA, 101 bp, Nicotiana tabacum
tccagccttgtttccggtttccttgctgagttctgctcgagtttcaagttygaggtgttgtccgagtttaaggtcatgaacagtgattaaagtgtgggttt

SEQ ID NO: 322 - DNA, 101 bp, Nicotiana tabacum
gcaacagaacaacgacgagcttgccagaaaatgagctgaaaagaccaccarcggctccttatccacctcgtcgaccaacgacctttcagcctgttcttttt

SEQ ID NO: 323 - DNA, 101 bp, Nicotiana tabacum
ctagatacacacagccgcacacttgtcttcttcggtactccctcaacaacrtcacacgcacacatacgaacagaggcggaaagggaaggtttaaaaaatca

SEQ ID NO: 324 - DNA, 101 bp, Nicotiana tabacum
ctgagttctgctcgagtttcaagttcgaggtgttgtccgagtttaaggtcwtgaacagtgattaaagtgtgggtttgaatccgtgtttggttgagtttccg

SEQ ID NO: 325 - DNA, 101 bp, Nicotiana tabacum
atcacatcatcaccctatcatccgagcataaacggccaagcagaatcaacraacaaggtgattatacaaaatctcaaaaagagattggaagaagctaaagg

SEQ ID NO: 326 - DNA, 101 bp, Nicotiana tabacum
atctcttataaaaatcctcacgttaaagggttgatttcggaagaacttatrcctggaatccaaatgttcttagagggaaatacacccgaaatcttgcataa

SEQ ID NO: 327 - DNA, 101 bp, Nicotiana tabacum
aggaagagaagcatctacgcccctagaagaaatgggtggatcctcccccgrttcgatattttggccttcgtcattttagtcttcagcatcatcgccttccg

SEQ ID NO: 328 - DNA, 101 bp, Nicotiana tabacum
ccgatttctcttcggttcctgagaaatcacaaccggaaccagaagaattgrtagcatcaggtcgagccgaaagacccctttttgcagctaactccaactca

SEQ ID NO: 329 - DNA, 101 bp, Nicotiana tabacum
cgagccgaaagacccctttttgcagctaactccaactcacgggccttagakatttcggcatcaaatcaataatacctgctttggcctattctaaggttttt

SEQ ID NO: 330 - DNA, 101 bp, Nicotiana tabacum
ggggaagaggtacgtcgacctttcgggaaactgcgatcggtagagatgatrcagtaattactggtggcagaaacagagttggtgaagaaggagatgaagtt

SEQ ID NO: 331 - DNA, 101 bp, Nicotiana tabacum
gctagtcctttccacgtgcgggttctgggtgtagacatgtgatttttgacmctccccaagatttttcataagcatgtaaatatttaatttaggcctaatat

SEQ ID NO: 332 - DNA, 101 bp, Nicotiana tabacum
accagatgagcctccccaatgccacttctctccacagaactcccaaagtcrtacatcactcttgcagtacccagctccacaaaatgcctatctacccccac

SEQ ID NO: 333 - DNA, 101 bp, Nicotiana tabacum
gtaacactctagtccaagcaggaaaaataatgaaaatgagagagtcttatyggtgaaaacccttacaggcaccgtaaggcgaagggagctgagagaaatca

SEQ ID NO: 334 - DNA, 101 bp, Nicotiana tabacum
actttatagttttctcgttaggaatcatctttttccattgtccttcactcmtttcctttttgtcttgtttacttccttttcctaagtctgtgcagttagaa

SEQ ID NO: 335 - DNA, 101 bp, Nicotiana tabacum
gctaacacataaaatgtcataagtcagaaaagaacaacaggtgcattgagytggtaataatcaacatgctttgggatcctgtgaaaatcaaaggttggtac

SEQ ID NO: 336 - DNA, 101 bp, Nicotiana tabacum
aagttatcatggcaagtgaaggagcaatagacctcaaggccaatgctagtrggttaagtcaggaaataacaacatgcacattgagtggatggtaattgacg

SEQ ID NO: 337 - DNA, 101 bp, Nicotiana tabacum
tggataatgggatttagtttttaaattttcaggactcttctagataatggratttaattttaaaaaagttttcaagcttctggttaatgggatttagtttt

SEQ ID NO: 338 - DNA, 101 bp, Nicotiana tabacum
gttaaaatcgaaccacagtctaaaatatgtactaaaatcagataataagcygaatatagyagttgagcgaccgtgctagaaccacggaactcgggaatgcc

SEQ ID NO: 339 - DNA, 101 bp, Nicotiana tabacum
gaaccacagtctaaaatatgtactaaaatcagataataagcygaatatagyagttgagcgaccgtgctagaaccacggaactcgggaatgcctaacacctt

SEQ ID NO: 340 - DNA, 101 bp, Nicotiana tabacum
gggtaaggttatccgctctgccagatcaggagccataatatctaaatcttkgcaatgacagtcttttccacaacaggaatactagaaggacagatggaaga

SEQ ID NO: 341 - DNA, 101 bp, Nicotiana tabacum
tacaacgataaccggcaaaagtgatgctaaatcaagggatgacgcgtgttyagccccaacccactcatggctgcatctgcgatagacaactcgcttctgcg

SEQ ID NO: 342 - DNA, 101 bp, Nicotiana tabacum
aagaaatttcagatttttcctaagtccatatttttatccgttaaccatccraacttcgccggaggccctcggtacctcaaccaaacataccaaaaatccaa

SEQ ID NO: 343 - DNA, 101 bp, Nicotiana tabacum
ttatcattatattgtggtttattgttaattgtcttacctaacggattgggmtatgtgccatcacgactagttgaattttgggtcgtaacaagttggtatca

SEQ ID NO: 344 - DNA, 101 bp, Nicotiana tabacum
tgcaagatgtgttcagatggtttgaatgtaactggaagagtttgcttgagrtgtgaaaaatgactattggatgctcgatttatgtggatgtgtcatatagt

SEQ ID NO: 345 - DNA, 101 bp, Nicotiana tabacum
ggatgcaatctttaaccattaatttttaggtttcaagttcgagacataagrattgagaaaatcctttacaatgagattttctctttagcaagcctcgaggt

SEQ ID NO: 346 - DNA, 101 bp, Nicotiana tabacum
tagcttcgtattatatttttttcccatggagctagaaataattaaataagrtatatatatttttgatcatttggatataaccatgatacctcgttacttcc

SEQ ID NO: 347 - DNA, 101 bp, Nicotiana tabacum
agtgcataaaagtgacaacaaagacaacaaacccattgaattccacaaatrgggtctggagaggatagtgtatacgcagaccttacccttaccttatgaag

SEQ ID NO: 348 - DNA, 101 bp, Nicotiana tabacum
attaatacgagtatcatggtaaattatgtacgttatttattatttcttaakggacgtaaaaagtcaaaacgtgacatgtaaaaatgaacggagggagtact

SEQ ID NO: 349 - DNA, 101 bp, Nicotiana tabacum
cacttcatccaccccacccctatacggtgtggcttcctcgtcgatctcccygatcccctgaataaccgacccaaggtacttgaaactacccctcttgggaa

SEQ ID NO: 350 - DNA, 101 bp, Nicotiana tabacum
gcggacccataatttttaggcgatggggcacattattctgctcaaccaatsccccctaaaggcttttagtgttcagggtgccaactgctttaaattaatta

SEQ ID NO: 351 - DNA, 101 bp, Nicotiana tabacum
agattgtacatcctccttatttttggtaatcttgtcaccttcaccctcccycttctcttgagaaacctttttcttttctagagccctacaattgactatgt

SEQ ID NO: 352 - DNA, 101 bp, Nicotiana tabacum
gccccgccagccacgccgccaatctgccggaaaacacagttcccatccatygagcagcccatcttcttcttcagctgaacgaccaaacgacccctgacctc

SEQ ID NO: 353 - DNA, 101 bp, Nicotiana tabacum
gtgcgtagttgctttaggcgtgctattttaaaattaccttcctaaactcgrgtgtgcatttatgtgaccaaatccaagtctcaacaacgttagataaaatg

SEQ ID NO: 354 - DNA, 101 bp, Nicotiana tabacum
ccgatcttctagaactacgcaaagatctgattcatgcgaggtcatgatacrtaggcaacctacatagggttcgatcgaatcatttttttatcactaaaaga

SEQ ID NO: 355 - DNA, 101 bp, Nicotiana tabacum
aaaaagggacaagaggatcaaaggccattgtttgttgctattgtggtgccrtttaacatcaacatggatctggcacggttttggcgttttttttttgtcac

SEQ ID NO: 356 - DNA, 101 bp, Nicotiana tabacum
tgtcactttaagttggaaaaaactcccttatatactcccttctcgggggtrtaagaaataggaggtgtgacaagtgtatccatgttgaatgcaccagttga

SEQ ID NO: 357 - DNA, 101 bp, Nicotiana tabacum
gcaattagggaaagaattgttgatggctatctatagagtccaactgattarctgctccattttgaaaagcttaaatctcttttgattcccatacttacaag

SEQ ID NO: 358 - DNA, 101 bp, Nicotiana tabacum
tctgaaccaaataaagatttttgctctttaatatactccatataatctgaytgcactgatcctagatccgataattttgtctcacccattacaaactgctc

SEQ ID NO: 359 - DNA, 101 bp, Nicotiana tabacum
atcactgcacagggtacaatcattgcaacatcaatgacctatcctgagtcygagctcactctctagttgcaccagtccattcactcctcgtggacatcaat

SEQ ID NO: 360 - DNA, 101 bp, Nicotiana tabacum
ccccaaatcgctactaactttaaacctttccgggcatcatctttctcgagycktcaacattagaaacactgactcaatcctgaaccactgcaccccgcgat

SEQ ID NO: 361 - DNA, 101 bp, Nicotiana tabacum
ccaaatcgctactaactttaaacctttccgggcatcatctttctcgagycktcaacattagaaacactgactcaatcctgaaccactgcaccccgcgatct

SEQ ID NO: 362 - DNA, 101 bp, Nicotiana tabacum
aaataccaagtctcattactccatcaacccaaatttgaacattcttagtcygattgcctttcccctgctgggaataaaataccaaatctctagatcatgca

SEQ ID NO: 363 - DNA, 101 bp, Nicotiana tabacum
ggaaacatcctaccatcatatcaatactgcggaacaatcgttcatagcatyatggcaacttgtgcctagcctcagagctctcagaagtactgctactgagc

SEQ ID NO: 364 - DNA, 101 bp, Nicotiana tabacum
atcaaatcgcacgatgaggaatcaagaagggaagtactcctaatagccctrtagcctcccgagataagtacagacatctcctgtcacgatccaaaccgaag

SEQ ID NO: 365 - DNA, 101 bp, Nicotiana tabacum
cctctgtgggcatcatcatcatcatattgtactagcctcaaagaggactcrgtaaaagcgtacccgaccatcataaggttcagtagaatcgtacccggcca

SEQ ID NO: 366 - DNA, 101 bp, Nicotiana tabacum
caccgcctaagtgggtcccattgggagcttcttgcgcggtctcgcgaaaaygcgaatatctctctactctgatatcgtattgatgaacggtttaatgcgtt

SEQ ID NO: 367 - DNA, 101 bp, Nicotiana tabacum
cgatcgcgctgctaatacaagaatcaccatacagagctattcccaaactcrgaatcccaaacgaacatcgataacactgaaatgcaattcaacccaaactt

SEQ ID NO: 368 - DNA, 101 bp, Nicotiana tabacum
ccggaattcaattccgacgatgcgcacaagtcataatacccgaagtgaagytgttcatggcctcaaaccgccgaaaaacatgccaaagctcaaaacgaccg

SEQ ID NO: 369 - DNA, 101 bp, Nicotiana tabacum
taattagattagtggactgccacgtttcccttgttaggggatttaaatttwatctaataattaattaattaggtaatatyccgctacctggtaattaacca

SEQ ID NO: 370 - DNA, 101 bp, Nicotiana tabacum
cttgttaggggatttaaatttwatctaataattaattaattaggtaatatyccgctacctggtaattaaccaattacccgtaaaataaaaaaaattgcccc

SEQ ID NO: 371 - DNA, 101 bp, Nicotiana tabacum
ttgttggttggaagaattgcccctttggccctgataattgttcacatattraacttcttcattctgcccatcataatcatcatcttgaaatccactacaat

SEQ ID NO: 372 - DNA, 101 bp, Nicotiana tabacum
gaacttatcctccaactcatcccaagtagtgatggaatggttgggaagtckctcaagccaatctaataccttccccccctaagtgataaagggaataatct

SEQ ID NO: 373 - DNA, 101 bp, Nicotiana tabacum
atacactaaacttctcactctatacctatcggtagtttgagtgattttgcsctaattgactttctcaagaccaattgggtatgataatttgtgcaagcaat

SEQ ID NO: 374 - DNA, 101 bp, Nicotiana tabacum
tgatatcctggtgtactcttgtagcagaaggagcatgcccatcatttgcgrattgtattgcagyggttgagagaggagaaactttatgctaagttctctag

SEQ ID NO: 375 - DNA, 101 bp, Nicotiana tabacum
tactcttgtagcagaaggagcatgcccatcatttgcgrattgtattgcagyggttgagagaggagaaactttatgctaagttctctaggtgtgagttttgg

SEQ ID NO: 376 - DNA, 101 bp, Nicotiana tabacum
ggagtggaagtgagagcggatcaccatggatttcatagttgggatcccacrgaactcgaggaggttcgattttgtttgggtgattgtggatcgactgacca

SEQ ID NO: 377 - DNA, 101 bp, Nicotiana tabacum
tatgagcttgccttaccacctagcttgtcgggggtgcatccaatatttcaygtttctatgctcyagaagtatattagcgatccgtctcatgttttgaattt

SEQ ID NO: 378 - DNA, 101 bp, Nicotiana tabacum
taccacctagcttgtcgggggtgcatccaatatttcaygtttctatgctcyagaagtatattagcgatccgtctcatgttttgaatttcagcacagttcag

SEQ ID NO: 379 - DNA, 101 bp, Nicotiana tabacum
tggatgtgatttgataggttttggcattgttggtagaatttggaagtttcraggttcattaggcttaaatccgtgtgcaagtcgtgtttttgatgttgttc

SEQ ID NO: 380 - DNA, 101 bp, Nicotiana tabacum
ggacgtgttggtatgtttggttgaggtcccgagggcctcgggttgatttcrggtggttaacagaataagattgaagtttgaaggattrctgtagtctggtg

SEQ ID NO: 381 - DNA, 101 bp, Nicotiana tabacum
tcgggttgatttcrggtggttaacagaataagattgaagtttgaaggattrctgtagtctggtgtttttgcacctacggtggggagccagcaggtgctgac

SEQ ID NO: 382 - DNA, 101 bp, Nicotiana tabacum
gcgaggtcgtgtacttgctgaattagatgctaattgttgttttgtactcarccatagctttttttgcttattatgcctccgtctcttatcattgttgaaac

SEQ ID NO: 383 - DNA, 101 bp, Nicotiana tabacum
ccgagtgattgagctattgagatgagctaagtgattgttgccttgagaggytgtacttgctttcggttattgttgcactagttgctatttgcccttattgt

SEQ ID NO: 384 - DNA, 101 bp, Nicotiana tabacum
ttcacgacttcaacatggtaagtatcatatatcagaaagtgattatatttyataaatccatggttatattcatcgtttaatttagatttaaatggaagaaa

SEQ ID NO: 385 - DNA, 101 bp, Nicotiana tabacum
aggagcgataagggtggctattgatattgtcagggcggagggataagagakgctattatatgagtgataagggtgtatatatgagcaataagggtggttat

SEQ ID NO: 386 - DNA, 101 bp, Nicotiana tabacum
ttctgcacattttgtgcagagctaggtactaaagctttcagactcgagcakagttagtgtgttgattgcaaggatttaaggtagagttgcttggtcgtcat

SEQ ID NO: 387 - DNA, 101 bp, Nicotiana tabacum
tgcaaaatatagaagttcaaagatttgaaaacttataatttgattcgatgygcgattcataatttcgacattttttgatgtgatttgaagtatcgactaag

SEQ ID NO: 388 - DNA, 101 bp, Nicotiana tabacum
tgtgtttggatttcatgaaaattatgtagggttctgagaggcgagtcccgygttgacttgtggttgacctttttgtaacgacccgaccatttatttgagag

SEQ ID NO: 389 - DNA, 101 bp, Nicotiana tabacum
gattgcattttggatgtctgtagctcatttaaacttgaaatggcgaaagtygaatttttggagttttggtccgatagtagaatttttgatatcagggtcgg

SEQ ID NO: 390 - DNA, 101 bp, Nicotiana tabacum
tgcggtctcagcccattttaaattaatttcgcacctgcgatggttttcccrcaggtgcgggccgcaaatacgtgtgagtaaccgcatgtgcagtttaacta

SEQ ID NO: 391 - DNA, 101 bp, Nicotiana tabacum
tagattctggagtatagaattactgtttcctttctatagtttgtgacttaygacattccgggttttgggagaggttatgtgcacctcgagagtggttattg

SEQ ID NO: 392 - DNA, 101 bp, Nicotiana tabacum
ttctgcattggtttttcggccgtcgaggtcgagccgtgaaatcaattactratgtatcagaataggttgcttacattatatcttttggaatgtgattttat

SEQ ID NO: 393 - DNA, 101 bp, Nicotiana tabacum
aaaagtcagttttgataaaaatacattgtgtagaggcgtagcaagattttrcactttataagttctaaatttaaaatagcgacaccagttattaataattg

SEQ ID NO: 394 - DNA, 101 bp, Nicotiana tabacum
tagtaaattattgttatatacagatgctgttatagagaagtctgattgttytaattatttattcataatagcaaacatcagctatgtttggctttttaaaa

SEQ ID NO: 395 - DNA, 101 bp, Nicotiana tabacum
gtaactaagataagcagtggattcaataataaatttagaacccataaactycatatcctagctccggcaccgagcagctcaaaatattaccattttaaaaa

SEQ ID NO: 396 - DNA, 101 bp, Nicotiana tabacum; identical to SEQ ID NO: 313

SEQ ID NO: 397 - DNA, 101 bp, Nicotiana tabacum
ccttcttctactcccctttctcccctactcgtcgacttagctgctcgattkgaatttggtttgtttgagacctcaatgatcacttcattttccgatccttt

SEQ ID NO: 398 - DNA, 101 bp, Nicotiana tabacum; identical to SEQ ID NO: 314

SEQ ID NO: 399 - DNA, 101 bp, Nicotiana tabacum; identical to SEQ ID NO: 318

SEQ ID NO: 400 - DNA, 101 bp, Nicotiana tabacum
acctgggaatgcctaacaccttctcccgtgttaataaaattccttgcccgratttctgtgttcgcaaaccataattagagttaaaccttcctcgatgctag

SEQ ID NO: 401 - DNA, 101 bp, Nicotiana tabacum
agctagcacttgcaactagcaagcgtcaaggttccaatccaaagtctacawgaagaaccattcaagactcaagatcaagcttcagaagacttatagatagg

SEQ ID NO: 402 - DNA, 101 bp, Nicotiana tabacum; identical to SEQ ID NO: 324

SEQ ID NO: 403 - DNA, 101 bp, Nicotiana tabacum; identical to SEQ ID NO: 326

SEQ ID NO: 404 - DNA, 101 bp, Nicotiana tabacum; identical to SEQ ID NO: 327

SEQ ID NO: 405 - DNA, 101 bp, Nicotiana tabacum
ttctaaccactttttggccaaataagtcattttgcaaaaatagcctcaatyctgtcttgcatgtgtctagtagggaatgttattgtctcacatagtattgg

SEQ ID NO: 406 - DNA, 101 bp, Nicotiana tabacum; identical to SEQ ID NO: 333

SEQ ID NO: 407 - DNA, 101 bp, Nicotiana tabacum; identical to SEQ ID NO: 335

SEQ ID NO: 408 - DNA, 101 bp, Nicotiana tabacum; identical to SEQ ID NO: 338

SEQ ID NO: 409 - DNA, 101 bp, Nicotiana tabacum; identical to SEQ ID NO: 339

SEQ ID NO: 410 - DNA, 101 bp, Nicotiana tabacum; identical to SEQ ID NO: 341

SEQ ID NO: 411 - DNA, 101 bp, Nicotiana tabacum
aatgtatttttttgttttggtgatgggccagtctagaggacttgaggcackgtttggaccttagcttaggctctatagtttcagttgtgtgagcatgtgct

SEQ ID NO: 412 - DNA, 101 bp, Nicotiana tabacum; identical to SEQ ID NO: 344

SEQ ID NO: 413 - DNA, 101 bp, Nicotiana tabacum; identical to SEQ ID NO: 345

SEQ ID NO: 414 - DNA, 101 bp, Nicotiana tabacum
taatattaagttcgtagaatagtttcagtttatttgttgaaaactaatttwaaaaaaagaagagtaagagattattcttttaatctagtgcgaatattaat

SEQ ID NO: 415 - DNA, 101 bp, Nicotiana tabacum
tcatcagggcttacctcaacatttcattaattgttgctagagctgccagaratagagtcgagatttgaaacttatgggttcagaattctagtctttttaag

SEQ ID NO: 416 - DNA, 101 bp, Nicotiana tabacum; identical to SEQ ID NO: 351

SEQ ID NO: 417 - DNA, 101 bp, Nicotiana tabacum
caaaaaaaaattacttttatatttcctttaggatattaggactaaaaattmaaaaaaaaaatatgatttttctcttttggtatctctttacaaattttctt

SEQ ID NO: 418 - DNA, 101 bp, Nicotiana tabacum
attttattttgcttagtttgtttagtcataatagcccgtttagtgttgtcwaggtttgtaaccccaatttagtttgtttgttttgttgtccaaatcctttc

SEQ ID NO: 419 - DNA, 101 bp, Nicotiana tabacum; identical to SEQ ID NO: 358

SEQ ID NO: 420 - DNA, 101 bp, Nicotiana tabacum; identical to SEQ ID NO: 364

SEQ ID NO: 421 - DNA, 101 bp, Nicotiana tabacum; identical to SEQ ID NO: 367

SEQ ID NO: 422 - DNA, 101 bp, Nicotiana tabacum; identical to SEQ ID NO: 368

SEQ ID NO: 423 - DNA, 101 bp, Nicotiana tabacum
taattagattagtggactgccacgtttcccttgttaggggatttaaatttwatctaataattaattaattaggtaatatcccgctacctggtaattaacca

SEQ ID NO: 424 - DNA, 101 bp, Nicotiana tabacum
tactcttgtagcagaaggagcatgcccatcatttgcggattgtattgcagyggttgagagaggagaaactttatgctaagttctctaggtgtgagttttgg

SEQ ID NO: 425 - DNA, 101 bp, Nicotiana tabacum
taccacctagcttgtcgggggtgcatccaatatttcatgtttctatgctcyagaagtatattagcgatccgtctcatgttttgaatttcagcacagttcag

SEQ ID NO: 426 - DNA, 101 bp, Nicotiana tabacum
ggctccaggtatgtttctagacccattcgaggatgaacgtttgtttaagakggggaggatgtaacgacccagccggtcgtttcgagagttatagccccatt

SEQ ID NO: 427 - DNA, 101 bp, Nicotiana tabacum; identical to SEQ ID NO: 379

SEQ ID NO: 428 - DNA, 101 bp, Nicotiana tabacum
tcctttagcctatattgattgtgttgtactacttttggctagattcgggaygtttggaggccagttcgaaaggcaaaggcattgcggagtaggattttact

SEQ ID NO: 429 - DNA, 101 bp, Nicotiana tabacum
gtgaaagactgtatggccttgtcggcctatggtcagtgtacgagtgatcawtttggtcttataggccaatatgtcttatgtataaggtggtattacatatt

SEQ ID NO: 430 - DNA, 101 bp, Nicotiana tabacum; identical to SEQ ID NO: 386

SEQ ID NO: 431 - DNA, 101 bp, Nicotiana tabacum
gggagatttgatggtgttagcctatgtctatcattttgttttgtacactaytgagggttatgagtccaaaagtgactttctattactcactacagtgggtt

SEQ ID NO: 432 - DNA, 101 bp, Nicotiana tabacum; identical to SEQ ID NO: 389

SEQ ID NO: 433 - DNA, 101 bp, Nicotiana tabacum
cccttgtccagctaggctgcaggtgcagtgagggatccgcagaagcataarcgcagaagtggttggggaccgcaagtgcggcctagtgctcgcaaatgcgg

SEQ ID NO: 434 - DNA, 101 bp, Nicotiana tabacum
cattctgcattggtttttcggccgtcgaggtcgagccgtgaaatcaattaytratgtatcagaataggttgcttacattatatcttttggaatgtgatttt

SEQ ID NO: 435 - DNA, 101 bp, Nicotiana tabacum
ttctgcattggtttttcggccgtcgaggtcgagccgtgaaatcaattaytratgtatcagaataggttgcttacattatatcttttggaatgtgattttat

SEQ ID NO: 436 - DNA, 101 bp, Nicotiana tabacum; identical to SEQ ID NO: 394

SEQ ID NO: 437 - DNA, 101 bp, Nicotiana tabacum
actagagctgaagttcgccagttacaaaaataaaaacttcagcacacttgsttcagcacacttgctacttcaggtccgtctactagaatgctgaagtttta

SEQ ID NO: 438 - DNA, 101 bp, Nicotiana tabacum
cgtatgctgaagttatgtgaaaaaacgggtacgcttgcaatttgtttttgyaaagcgggcacaagttaaaacgtgacacaaaaagcggatatagatgtaaa

SEQ ID NO: 439 - DNA, 101 bp, Nicotiana tabacum
cttaaaggagcaataggaggccataatatgtcatcccacactgcaggatcrggttatgacggaattaaagcaagcgttattgggtgtatccaataatgaga

SEQ ID NO: 440 - DNA, 101 bp, Nicotiana tabacum
cggcgcatgctcccaagccaagcgaagctaaccagggggaggagtcgtcaraatcttatcaggtatggagatattttcaggtaccaaaagaaaacggacgc

SEQ ID NO: 441 - DNA, 101 bp, Nicotiana tabacum
ataattagagttaaaccttcctcgatgctagattttaaaccggtgacttgmgacaccaataaactatcccaagtggcgamtctgatttttatatgaataat

SEQ ID NO: 442 - DNA, 101 bp, Nicotiana tabacum
agattttaaaccggtgacttgmgacaccaataaactatcccaagtggcgamtctgatttttatatgaataatcccgtttcgattgtcacttaaattgaaaa

SEQ ID NO: 443 - DNA, 101 bp, Nicotiana tabacum
tgaatgatgaattgattttgtcatttgaaagttaaacaagtacttcaaatkctagttccgtaatgaacagcagaagtcctcttcaagagcaccgtaaacat

SEQ ID NO: 444 - DNA, 101 bp, Nicotiana tabacum; identical to SEQ ID NO: 330

SEQ ID NO: 445 - DNA, 101 bp, Nicotiana tabacum; identical to SEQ ID NO: 331

SEQ ID NO: 446 - DNA, 101 bp, Nicotiana tabacum
atgtaaattaaagtgtagtatttatacatgtcctaataatttcgaatttcrgattggattggattaaaatataccaatccgaaatccgatccgaaatccga

SEQ ID NO: 447 - DNA, 101 bp, Nicotiana tabacum
gagtcaataccccgattggtgaagaagaaatggttgagcttttcctacaakcctagggtcccacctactttagtcatttgatcccggccctggggaagcct

SEQ ID NO: 448 - DNA, 101 bp, Nicotiana tabacum
ggaagagtttgcttgagatgtgaaaaatgactattggatgctcgatttatrtggatgtgtcatatagtcttgagttataaaggtttttgagaaattctttc

SEQ ID NO: 449 - DNA, 101 bp, Nicotiana tabacum
atatataattccaaataagtttgaggtcagctatatgaatatttattattsatatcgctctatttaaacttatttaaattaaattaactaattttatatta

SEQ ID NO: 450 - DNA, 101 bp, Nicotiana tabacum
atcttagttcgaatccaagacctctaattaagagtaaaaggatcctatccrtcacactataatccttgttgatgggaacctctttcttcaactctcctaaa

SEQ ID NO: 451 - DNA, 101 bp, Nicotiana tabacum; identical to SEQ ID NO: 346

SEQ ID NO: 452 - DNA, 101 bp, Nicotiana tabacum
tatataatatatgctaattaaacacagctattcatatattatacataaacrtatatattatacataaacatatatattatgcattcctcgtgtaagtagtt

SEQ ID NO: 453 - DNA, 101 bp, Nicotiana tabacum
ctgcttatgcttttttgagccgagagtctattggaaacaacctctccataytcacaaagttgggataaggtctgcgtacacactaccctcccaggcccacg

SEQ ID NO: 454 - DNA, 101 bp, Nicotiana tabacum
cattctcagtatcactgccccttttgtagttcatgttgattctgttcgtgytgccttcgttaacctcttgctcccattcttttccatccaagtcgataact

SEQ ID NO: 455 - DNA, 101 bp, Nicotiana tabacum
aagaggatcaaaggccattgtttgttgctattgtggtgccatttaacatckacatggatctggcacggttttggtgttttttttgtcactttggttttggt

SEQ ID NO: 456 - DNA, 101 bp, Nicotiana tabacum; identical to SEQ ID NO: 353

SEQ ID NO: 457 - DNA, 101 bp, Nicotiana tabacum
tctcatcttcggggatgtgctcgctggtcgagactccttattctattagtrtcataccttgaaagtaagaaagaggctcggacaagttactaagccggatg

SEQ ID NO: 458 - DNA, 101 bp, Nicotiana tabacum
agtatgttctatcctatgtgaataaaatctcaaaatgcatggccctcactyattttttttaatccttagaaatcgaggcgtgccatttaattgaatttcca

SEQ ID NO: 459 - DNA, 101 bp, Nicotiana tabacum
actactaaagataacaatatcatcagcatatgccaagtaattgatttgagrgcccctatgagacatagagcaaggtataaaattattattgagtttctagt

SEQ ID NO: 460 - DNA, 101 bp, Nicotiana tabacum; identical to SEQ ID NO: 359

SEQ ID NO: 461 - DNA, 101 bp, Nicotiana tabacum
acttcaaacctttcttaaggtgcgtggtcatcctaccacaagcccatatgmaactccgccactctcccactttggcgaaactcacccctttagtcgactac

SEQ ID NO: 462 - DNA, 101 bp, Nicotiana tabacum
cgctgagctaatagcctactggaggactgtcaacctatcaatcgagacctkcgggcatgaaatgcagcgtccccaggcaaaagggatgtcagtacaaataa

SEQ ID NO: 463 - DNA, 101 bp, Nicotiana tabacum; identical to SEQ ID NO: 365

SEQ ID NO: 464 - DNA, 101 bp, Nicotiana tabacum; identical to SEQ ID NO: 371

SEQ ID NO: 465 - DNA, 101 bp, Nicotiana tabacum; identical to SEQ ID NO: 373

SEQ ID NO: 466 - DNA, 101 bp, Nicotiana tabacum
tccctagttatcaggtcactcagcccattctatccctccataccttatggmacctgctgagttgaaagagttgaataagtagcttcaggaactccttgaga

SEQ ID NO: 467 - DNA, 101 bp, Nicotiana tabacum
aaatttccaagatgttagatcgtgtttaaagtgaggaaagggagcctaagyaggccaaaaggtctcaaaattctggaggattcggtggatttttttctgca

SEQ ID NO: 468 - DNA, 101 bp, Nicotiana tabacum
cttagaatagcatgcctacttaccttaattgcttatctgagctctgtgcakcatgtttagtgaaatttcctgcttttccttgacttgtacttagtccacag

SEQ ID NO: 469 - DNA, 101 bp, Nicotiana tabacum; identical to SEQ ID NO: 391

SEQ ID NO: 470 - DNA, 101 bp, Nicotiana tabacum
ttcgtgtgtttgttgatttgatatttcctgaaaataattatattatagacyttttcatctgcaaataattaattaaataagtttaaattgagatgttaata

SEQ ID NO: 471 - DNA, 101 bp, Nicotiana tabacum
tataaaacgggtcaaatatgaataagaaccatattattcatttagaaaatrgataactaatgagtaaacatggataatcaatgggcctaacatttacattt

SEQ ID NO: 472 - DNA, 101 bp, Nicotiana tabacum
ctgatgtatcagaataggttgcttacattatatcttttggaatgtgatttyatttcaaatcctaagtaaacatgagatatttcgtgtgcattgaattgttc

SEQ ID NO: 473 - DNA, 101 bp, Nicotiana tabacum
atgctaaatgaataagttctaatgcatgaaaataagtttcctaaagttttycccaaaaagtcaaaaaatggccccagcccacatggttaaaacccgaggtt

SEQ ID NO: 474 - DNA, 101 bp, Nicotiana tabacum
tcatgtacttcactatttcttgcggatctatcgtatcgttgcttctctctkattgtaatttcccatgtgccttactataccgctaaggaaaacaaacaaga

SEQ ID NO: 475 - DNA, 101 bp, Nicotiana tabacum
atttcttaatataaaaaaagtatttattttcttgggacagactaaaaaagwaagtgtatcacataaatagggacaaatggagtaataatgttactttatat

SEQ ID NO: 476 - DNA, 101 bp, Nicotiana tabacum
tagaatgcttaagttcaacaattacaaacaaaaacttcagccaatactaartttatgcgaaattttttagctaaaacatgctaaagttcarcaaatagaga

SEQ ID NO: 477 - DNA, 101 bp, Nicotiana tabacum
ccaatactaartttatgcgaaattttttagctaaaacatgctaaagttcarcaaatagagaacaaaacttcagctagtagaatgcttaagttcggcaatta

SEQ ID NO: 478 - DNA, 101 bp, Nicotiana tabacum
cagatctgcaggtgagaaaatgtcaaatgtagtaggcgtaagagagtgagrctctgcctataaaaggagagcttcagctctcatctcgacacactaatctc

SEQ ID NO: 479 - DNA, 101 bp, Nicotiana tabacum
cgctacaacatgaagaatgataagctagtcagcacacctcttgctagtcawctaaagttgagcaaaaagatgtgtcctacaacagaagagacgaaagggaa

SEQ ID NO: 480 - DNA, 101 bp, Nicotiana tabacum
gttccttcaagagcttggattgcatcagaaggagtatatcatctattgtgrcagtcaaagtgcaatagacctgagcaaaaataccatgtatcatgcaagga

SEQ ID NO: 481 - DNA, 101 bp, Nicotiana tabacum
cagatctgcatgagagaaaatgtcaaatgtagtaggcgtaagagagtgagrctctgcctataaaaggagagcttcagctctcatytcgacacacyaatctc

SEQ ID NO: 482 - DNA, 101 bp, Nicotiana tabacum
ggcgtaagagagtgagrctctgcctataaaaggagagcttcagctctcatytcgacacacyaatctcagaagaaaaatatatctgagagttagaaagaaag

SEQ ID NO: 483 - DNA, 101 bp, Nicotiana tabacum
agtgagrctctgcctataaaaggagagcttcagctctcatytcgacacacyaatctcagaagaaaaatatatctgagagttagaaagaaagagtgaggttt

SEQ ID NO: 484 - DNA, 101 bp, Nicotiana tabacum
caggttctgtgtatagctccttgtagaattcaataatctcgttctctattmtttctggatcctcgattacttcatgtcgaataattatttggtcaatgttg

SEQ ID NO: 485 - DNA, 101 bp, Nicotiana tabacum; identical to SEQ ID NO: 474

SEQ ID NO: 486 - DNA, 101 bp, Nicotiana tabacum; identical to SEQ ID NO: 475

SEQ ID NO: 487 - DNA, 101 bp, Nicotiana tabacum
tagaatgcttaagttcaacaattacaaacaaaaacttcagccaatactaartttatgcgaaattttttagctaaaacatgctaaagttcagcaaatagaga

SEQ ID NO: 488 - DNA, 101 bp, Nicotiana tabacum
atctttggacccttccgcgaatattaaaggcagcacaatgcacaaagtatyttgtattcacatagagttcggaaaaagaccgcatcaaaaggagtgtgatg

SEQ ID NO: 489 - DNA, 101 bp, Nicotiana tabacum; identical to SEQ ID NO: 478

SEQ ID NO: 490 - DNA, 101 bp, Nicotiana tabacum
acctacaaagtgtaaaattccttgctatagtgatatcagttgctcttctcrgggccgtgatttttttcccttattcaaaagggttttccacgtaaaaatct

SEQ ID NO: 491 - DNA, 101 bp, Nicotiana tabacum
aacattaaattatttcttaatataaaaaaagtatttattttcttgggacaractaaaaaagaaagtgtatcacataaatagggacaaatggagtaataatg

SEQ ID NO: 492 - DNA, 101 bp, Nicotiana tabacum
aacttataccctaatttttacaactttaggcccctccttctttctgctacmtgtgcgctcctttcttcttcatttcttttcctcttccgcaaatgaaactc

SEQ ID NO: 493 - DNA, 101 bp, Nicotiana tabacum
ccaatactaagtttatgcgaaattttttagctaaaacatgctaaagttcarcaaatagagaacaaaacttcagctagtagaatgcttaagttcggcaatta

SEQ ID NO: 494 - DNA, 101 bp, Nicotiana tabacum
tgcaagcattaataactgcttctatggttcgaactcgtaacctatagacarcctacccattcgagaatatattctacaaatattgtacaatataaacaaaa

SEQ ID NO: 495 - DNA, 101 bp, Nicotiana tabacum
atgaggacgaggaatgcatgcacctgtcaggtccaaagtcggaatgggtgrttgacacagcggcatcttaccatgccacaccggtaagagatcctttttgc

SEQ ID NO: 496 - DNA, 101 bp, Nicotiana tabacum
tgacttctattcgaacaattttgagcttagcagctagcctagatcttgaartggagcagttggatgtgaaaactgcatttcttcatggagatttggaagag

SEQ ID NO: 497 - DNA, 101 bp, Nicotiana tabacum
tcatttgctccttgtacttccatctcttcactcggttgttttgatctgtcracgcttctttaagtgcaaagcatatccattccattgcctttctacccatg

SEQ ID NO: 498 - DNA, 101 bp, Nicotiana tabacum
ccaagtatctttgttggagttccatctggtgatgtcaaaagatttgaatcmtgcattgaagtatatcctgttgtctcccatattgtactaaacagctgctc

SEQ ID NO: 499 - DNA, 101 bp, Nicotiana tabacum
aattttgaaaagtggccgggattgagctcacgcgccggcgcgtggtatttkgctcgccggaaagtgccgcgcgtggcggcgcgtgagagactgtttgtcgg

SEQ ID NO: 500 - DNA, 101 bp, Nicotiana tabacum
ggagaaatacgcaaaaggaataaaagcaacgtcaattaaaaatacatatayaaagaaaataggagaaagcgaagagtacctcctcaaagaattagttgaat

SEQ ID NO: 501 - DNA, 101 bp, Nicotiana tabacum
gatgatctaccacaacatgcccaaaagtgcgtccgagtacagttcttaatsgatatcagcaataaaagctaaaggaactaacgccccaatgacataaactc

SEQ ID NO: 502 - DNA, 101 bp, Nicotiana tabacum
tcgcaaatgcgagactatgttcgcatttgcgaggtgggtgatcgaaattgmgacgtatgctggggtctgtcgggttcgcatttgcgaactcagtgttcgta

SEQ ID NO: 503 - DNA, 101 bp, Nicotiana tabacum
ggactcgagattaatttttggggaattatgtaaagatcatagctttatttrttggaattaatttctcttgcattatttgatgttactaagctgattttggt

SEQ ID NO: 504 - DNA, 101 bp, Nicotiana tabacum
tttgcactatttgaactacgtgaaaggcgtgtactcgaggtgacgagtgtrtacacggccttatatatgaaaatttgactggtttagactcttaggtttct

SEQ ID NO: 505 - DNA, 101 bp, Nicotiana tabacum
gttgttatattatattgttacgcttttggtacatgtgggattgttgagagrattgtcggggtatttgcacgtgagttgtctgtgctaaagttattattaat

SEQ ID NO: 506 - DNA, 101 bp, Nicotiana tabacum
agttttggcccaaaaataaaataatttttttcattagcttatagtaacttyacaactccacttccttcaacaactcatgtgtctaggcccaaacattggat

SEQ ID NO: 507 - DNA, 101 bp, Nicotiana tabacum
tataaatgaacaccaaagaacaccaaaagaaaaagaagcaacccatatcaytaatcaaaacaagataagaagtggacctcaaaagttgaatctgaaaattt

SEQ ID NO: 508 - DNA, 101 bp, Nicotiana tabacum
aatttttattattaaacacaatttatgtcgaggtcgtacgacccgatccaraataatgtgtacactaccaatgatcgagcggcacgaaccatagatgcatc

SEQ ID NO: 509 - DNA, 101 bp, Nicotiana tabacum
gccgaggcattcggcctactccacaagaagagaaggatatattataagcayttgacttaaacatttttgaggttttatacaaaagcaatacgaatttcatt

SEQ ID NO: 510 - DNA, 101 bp, Nicotiana tabacum
atcccattccataactattttcgtggttaaaatctcatttttatcaaaaayctaggtttttcatcttaacccttgatttccacagtttacatgttataatc

SEQ ID NO: 511 - DNA, 101 bp, Nicotiana tabacum
gcggctgtccatgcagaggtgcggttacactagaagctagaagcttcaacyattgctcctaagtccaaacttggtccgagcctcgtccgattaacacccga

SEQ ID NO: 512 - DNA, 101 bp, Nicotiana tabacum
tgattggtaatgtgggcacgagatgccaagtgattataattcgtgatttgrgacttgtgattgtgattatgaggtgtggtacctcagggtgattctcgtgt

SEQ ID NO: 513 - DNA, 101 bp, Nicotiana tabacum
gtacaagttcttatgtctagtaggtgcctcgactgtacctcgtcactactycaccgaagttagtcttgatacttactgggtaccgttgtggtgtactcatg

SEQ ID NO: 514 - DNA, 101 bp, Nicotiana tabacum
taggcttacctagtcttagagattaagtgtaatcgcgacatcttaaggtaraaatttgggatcgtgataagttggtatgttgagaatgaaccctttctata

SEQ ID NO: 515 - DNA, 101 bp, Nicotiana tabacum
cgtccacaaaacaatgtgaacttagggaatcaatgtaatattttttttggycattgggaattcaatgtaatatatatgcatgcatccacatatataatttg

SEQ ID NO: 516 - DNA, 101 bp, Nicotiana tabacum
cgaagctaatttatttattatttttatttttattttaaaatcattaggtgkggattggggaagtaagatgataatgtctatattattcgaactattttatt

SEQ ID NO: 517 - DNA, 101 bp, Nicotiana tabacum; identical to SEQ ID NO: 503

SEQ ID NO: 518 - DNA, 101 bp, Nicotiana tabacum; identical to SEQ ID NO: 504

SEQ ID NO: 519 - DNA, 101 bp, Nicotiana tabacum
  misc_feature (1)..(34): n is a, c, g, or t
nnnnnnnnnnnnnnnnnnnnnnnnnnnnnnnnnngagagagagagagagakagatatgctcatccaaagtttgatcttatgcgtactcatttagaacttta

SEQ ID NO: 520 - DNA, 101 bp, Nicotiana tabacum; identical to SEQ ID NO: 510

SEQ ID NO: 521 - DNA, 101 bp, Nicotiana tabacum
aaacgagacaaatttgcgtagtatggagctggaaaaattaaatttgacgcygattcatatatattaccctaacaaatttgagatttggtctagttgattga

SEQ ID NO: 522 - DNA, 101 bp, Nicotiana tabacum
taaactggaacaaaggaagtatcaactttttgagtctgaggaaaagtgggytgtaggaagcgctcgcttcttaggcagagcatgaagcgatgaagatgcga

SEQ ID NO: 523 - DNA, 101 bp, Nicotiana tabacum
cgctttcaaaatcactggtgacaagacagcatttcagggctctacaatacytttacatacactcatctaacaaccttgcagcttaggttgtagcaatgctg

SEQ ID NO: 524 - DNA, 101 bp, Nicotiana tabacum; identical to SEQ ID NO: 500

SEQ ID NO: 525 - DNA, 101 bp, Nicotiana tabacum; identical to SEQ ID NO: 501

SEQ ID NO: 526 - DNA, 101 bp, Nicotiana tabacum
atgtcgtacacttgtcgtttggtacacattgcaaatcgcgccatgtgaaaygcacgcgccacgtgaaacgcacgcgcgatttacaacatgtttattattat

SEQ ID NO: 527 - DNA, 101 bp, Nicotiana tabacum
acacttattatcatatccaattaatatccatcatattaatagtcctcgtcyacatacaaaataatataattagcgcatatcaactttcttaatagtgctta

SEQ ID NO: 528 - DNA, 101 bp, Nicotiana tabacum; identical to SEQ ID NO: 508

SEQ ID NO: 529 - DNA, 101 bp, Nicotiana tabacum
ttgcggttgtgattggtaatgtgggcacgagatgccaagtgattataattygtgatttgrgacttgtgattgtgattatgaggtgtggtacctcagggtga

SEQ ID NO: 530 - DNA, 101 bp, Nicotiana tabacum
tgattggtaatgtgggcacgagatgccaagtgattataattygtgatttgrgacttgtgattgtgattatgaggtgtggtacctcagggtgattctcgtgt

SEQ ID NO: 531 - DNA, 101 bp, Nicotiana tabacum; identical to SEQ ID NO: 513

SEQ ID NO: 532 - DNA, 101 bp, Nicotiana tabacum
cctagtcttagagattaagtgtaatcgcgacatcttaaggtagaaatttgrgatcgtgataagttggtatgttgagaatgaaccctttctatactctgtat

SEQ ID NO: 533 - DNA, 101 bp, Nicotiana tabacum; identical to SEQ ID NO: 515

SEQ ID NO: 534 - DNA, 101 bp, Nicotiana tabacum
gaccgttatattatactggaattccagtatatattattgaagtatttttcyggattttgtatagtgttttcgttcagatttatctttacatgaaaagtggc

SEQ ID NO: 535 - DNA, 101 bp, Nicotiana tabacum
agcgctgtcttcttacacattaattgtattgtgtgtttattactccctccrtctcatagtacctgtcatgattctcttgtgcacgccccttaagaaaaatt

SEQ ID NO: 536 - DNA, 101 bp, Nicotiana tabacum
aaacatgataaagtgtttaagaaaactaggttgactcattggtatttgaamaaagttattcataattgaggtgtttgtagtctttaaggataattattacc

SEQ ID NO: 537 - DNA, 101 bp, Nicotiana tabacum
acgtggttcttatccacacaaaaatgaattttcccattcggtattcaataycgrtattgagacccgattaaatttagattcatgctagaaaagtcccccgt

SEQ ID NO: 538 - DNA, 101 bp, Nicotiana tabacum
tggttcttatccacacaaaaatgaattttcccattcggtattcaataycgrtattgagacccgattaaatttagattcatgctagaaaagtcccccgttga

SEQ ID NO: 539 - DNA, 101 bp, Nicotiana tabacum
cccgattaaatttagattcatgctagaaaagtcccccgttgagaggtaaartggtctctcataaagacgaatttatacttagggctcgaatccgagacttc

SEQ ID NO: 540 - DNA, 101 bp, Nicotiana tabacum
cgcgaaatccacaacagacgattgccaaaatatggcatacgtccacccttygcgagccccatcgattaaagtctggagtcgctgttgcagtgactcttggt

SEQ ID NO: 541 - DNA, 101 bp, Nicotiana tabacum
ccctttgtggtttgcaggttattacacagggaaagtttacccagtacacayaaagtgctcaccacagagtgctcatccgaagggtagaggctgtagcaaag

SEQ ID NO: 542 - DNA, 101 bp, Nicotiana tabacum
tctaattttcaaatattattttcacttaaaaaaagatttcactttttttgraattttacaattcttatgtccaagcgccaactatttttgttcatttaaat

SEQ ID NO: 543 - DNA, 101 bp, Nicotiana tabacum
actcataaacatgtttcacaccttacactactagaagttcgataaaaatcsaccggagctaaccggtcgatattgtaatttacatatggattcatttsaat

SEQ ID NO: 544 - DNA, 101 bp, Nicotiana tabacum
atcsaccggagctaaccggtcgatattgtaatttacatatggattcatttsaattttgaactaaaatctatcaaaattagtgaaaatattgagctttgaac

SEQ ID NO: 545 - DNA, 101 bp, Nicotiana tabacum
ccaacaactgtcaggcagctaacagcttgtttggatggttgttactcattrtatcgtattgtattgtattgtattgttatctcaaaataatgcttgttttg

SEQ ID NO: 546 - DNA, 101 bp, Nicotiana tabacum
ctagacaacgtgctcttaggctgatgctttctgaattgtttccaaggaatrcttctatcatatgttctgcctttcttcctcttttttcctttgcttctcct

SEQ ID NO: 547 - DNA, 101 bp, Nicotiana tabacum
aaatttcagcacacttggttcaacacacttgctacttcagtcccgtctaayagaatgctgaagttttgtgtgattgtctttgctacttcagccctgtatgc

SEQ ID NO: 548 - DNA, 101 bp, Nicotiana tabacum
cctgtatgctgaagttacgcgaaaaagtaggtacgcttgcaattttttttrcaaagcgggcacaagttaaaacgtgactcaaaaagcggatatagatgcaa

SEQ ID NO: 549 - DNA, 101 bp, Nicotiana tabacum
catcatctatgagtggggtccagggacggaccataaaaatctactgtattyaattttatactrtatttctgcaaaagattattttcacggcaacaacccgt

SEQ ID NO: 550 - DNA, 101 bp, Nicotiana tabacum
gtggggtccagggacggaccataaaaatctactgtattyaattttatactrtatttctgcaaaagattattttcacggcaacaacccgtgacctcttggtc

SEQ ID NO: 551 - DNA, 101 bp, Nicotiana tabacum; identical to SEQ ID NO: 536

SEQ ID NO: 552 - DNA, 101 bp, Nicotiana tabacum
tggttcttatccacacaaaaatgaattttcccattcggtattcaataccgrtattgagacccgattaaatttagattcatgctagaaaagtcccccgttga

SEQ ID NO: 553 - DNA, 101 bp, Nicotiana tabacum; identical to SEQ ID NO: 539

SEQ ID NO: 554 - DNA, 101 bp, Nicotiana tabacum
gtatataaaatttgtatattttttttgtatgtaacatatatatatatatawtaaaaatataattgtttgctattattttgagagcggctatacggtgtcct

SEQ ID NO: 555 - DNA, 101 bp, Nicotiana tabacum; identical to SEQ ID NO: 540

SEQ ID NO: 556 - DNA, 101 bp, Nicotiana tabacum
gatcgatcggatttagcatatttcggatttcggattatagaaaatgcaatycgaattcgatcctaaatatatcggatcggatcggattttaaagtttggat

SEQ ID NO: 557 - DNA, 101 bp, Nicotiana tabacum
atcgaccggagctaaccggtcgatattgtaatttacatatggattcatttsaattttgaactaaaatctatcaaaattagtgaaaatattgagctttgaac

SEQ ID NO: 558 - DNA, 101 bp, Nicotiana tabacum; identical to SEQ ID NO: 545

SEQ ID NO: 559 - DNA, 101 bp, Nicotiana tabacum; identical to SEQ ID NO: 548

SEQ ID NO: 560 - DNA, 101 bp, Nicotiana tabacum
gtgttttatttttatccatttgtctaagctttttggtagacatagttactrgatacctgtgcgggttgaaaatagcaggtatttggtaaaattaattgaag

SEQ ID NO: 561 - DNA, 101 bp, Nicotiana tabacum
gtgttatttcatatgtactaaatattttttaggagattgagttgagggtargggttgttttttttggatttttgttttctcccattttattggagatgtta

SEQ ID NO: 562 - DNA, 101 bp, Nicotiana tabacum
atataaaatttgtatattttttttgtatgtaacatatatatatatataatwaaaatataattrtttgctattattttgagagcggctatacggtgtccttt

SEQ ID NO: 563 - DNA, 101 bp, Nicotiana tabacum
tatattttttttgtatgtaacatatatatatatataatwaaaatataattrtttgctattattttgagagcggctatacggtgtccttttcctttaaaatt

SEQ ID NO: 564 - DNA, 101 bp, Nicotiana tabacum
tgcacggatcagatcgatcggatttagcatatttcggatttcggattataraaaatgcaattcgaattcgatcctaaatatatcggatcggatcggatttt

SEQ ID NO: 565 - DNA, 101 bp, Nicotiana tabacum
ctttgtaaaagagacaatacattaagaaaaattcatgtttatgcaattatragagtactatggtgccaatatagctaaatctagcaattgtaaaggtaata

SEQ ID NO: 566 - DNA, 101 bp, Nicotiana tabacum
cagaccgcctaagagactttccgactgtcgaaggaaggaagttcagttttyagtgaccagaaattgactagtttatttaattgacttaaagatctttcttt

SEQ ID NO: 567 - DNA, 101 bp, Nicotiana tabacum
aaaatttgatacgaactaaaaaggaaattggttcacttaaataaaatgaakagttatttttatttgaccagaattgacgcggccctgcaactgaacacgcg

SEQ ID NO: 568 - DNA, 101 bp, Nicotiana tabacum
tctagagctaaagttcgtcagttacaaaaacaaaaacttcagcaattacaracaaaaatttcagcaaatagagaacaaaacttcagctactatgcttaagt

SEQ ID NO: 569 - DNA, 101 bp, Nicotiana tabacum
gtggggtccagggacggaccataaaaatctactgtattcaattttatactrtatttctgcaaaagattattttcacggcaacaacccgtgacctcttggtc

SEQ ID NO: 570 - DNA, 20171 bp, Artificial Sequence
  TRV1
gatggtaagaagaaaggcgcgcagtatgcgatagctcttcacagcctgtatgacttcaagttgaaagacttgatggctactatggttgagaagaaaactaaagtggttcatgctgctatgctttttgctcctgaaagtatgttagtggacgaaggtccattaccttctgttgacggttactacatgaagaagaacgggaagatctatttcggttttgagaaagatccttccttttcttacattcatgactgggaagagtacaagaagtatctactggggaagccagtgagttaccaagggaatgtgttctacttcgaaccgtggcaggtgagaggagacacaatgcttttttcgatctacaggatagctggagttccgaggaggtctctatcatcgcaagagtactaccgaagaatatatatcagtagatgggaaagcatggttgttgtcccaattttcgatctggtcgaatcaacgcgagagttggtcaagaaagacctgtttgtagagaaacaattcatggacaagtgtttggattacatagctaggttatctgaccagcagctgaccataagcaatgttaaatcatacttgagttcaaataattgggtcttattcataaacggggcggccgtgaagaacaagcaaagtgtagattctcgagatttacagttgttggctcaaactttgctagtgaaggaacaagtggcgagacctgtcatgagggagttgcgtgaagcaattctgactgagacgaaacctatcacgtcattgactgatgtgctgggtttaatatcaagaaaactgtggaagcagtttgctaacaagatcgcagtcggcggattcgttggcatggttggtactctaattggattctatccaaagaaggtactaacctgggcgaaggacacaccaaatggtccagaactatgttacgagaactcgcacaaaaccaaggtgatagtatttctgagtgttgtgtatgccattggaggaatcacgcttatgcgtcgagacatccgagatggactggtgaaaaaactatgtgatatgtttgatatcaaacggggggcccatgtcttagacgttgagaatccgtgccgctattatgaaatcaacgatttctttagcagtctgtattcggcatctgagtccggtgagaccgttttaccagatttatccgaggtaaaagccaagtctgataagctattgcagcagaagaaagaaatcgctgacgagtttctaagtgcaaaattctctaactattctggcagttcggtgagaacttctccaccatcggtggtcggttcatctcgaagcggactgggtctgttgttggaagacagtaacgtgctgacccaagctagagttggagtttcaagaaaggtagacgatgaggagatcatggagcagtttctgagtggtcttattgacactgaagcagaaattgacgaggttgtttcagccttttcagctgaatgtgaaagaggggaaacaagcggtacaaaggtgttgtgtaaacctttaacgccaccaggatttgagaacgtgttgccagctgtcaaacctttggtcagcaaaggaaaaacggtcaaacgtgtcgattacttccaagtgatgggaggtgagagattaccaaaaaggccggttgtcagtggagacgattctgtggacgctagaagagagtttctgtactacttagatgcggagagagtcgctcaaaatgatgaaattatgtctctgtatcgtgactattcgagaggagttattcgaactggaggtcagaattacccgcacggactgggagtgtgggatgtggagatgaagaactggtgcatacgtccagtggtcactgaacatgcttatgtgttccaaccagacaaacgtatggatgattggtcgggatacttagaagtggctgtttgggaacgaggtatgttggtcaacgacttcgcggtcgaaaggatgagtgattatgtcatagtttgcgatcagacgtatctttgcaataacaggtaataatcctctctcttgatatttttaaattatagaattaattagtttactttattctttactatatgatttaaatagtttaatcttgtttttgagtaaactattcgattttgatatttgtattcgtcctacaaagttggaaatactgatgatattttcttttgaacgtgatacctaccaatactaatcttacggaatcttttaatagagcactaatcaacatggaactaaagaccaattcttaagtgtctctgttgtacagttcattttagtagtgcgtttaagtattattatctcccttcatgcggggcaattatgtagattaaaatcgaaattatataaaatttacataagtctaagtctagggtctccagctaattgttatttttttaacgatgttgactaaagcaataacgacgttgacttgtgttaaacaggttgatcttggacaatttaagtgccctggatctaggaccagttaactgttcttttgaattagttgacggtgtacctggttgtggtaagtcgacaatgattgtcaactcagctaatccttgtgtcgatgtggttctctctactgggagagcagcaaccgacgacttgatcgagagattcgcgagcaaaggttttccatgcaaattgaaaaggagagtgaagacggttgattcttttttgatgcattgtgtcgatggttctttaaccggagacgtgttgcatttcgacgaagctctcatggcccatgctggtatggtgtacttttgcgctcagatagctggtgctaaacgatgtatctgtcaaggagatcagaatcaaatttctttcaagcctagggtatctcaagttgatttgaggttttctagtctggtcggaaagtttgacattgttacagaaaaaagagaaacttacagaagtccagcagatgtggctgccgtattgaacaagtactatactggagatgtcagaacacataacgcgactgctaattcgatgacggtgaggaagattgtgtctaaagaacaggtttctttgaagcctggtgctcagtacataactttccttcagtctgagaagaaggagttggtaaatttgttggcattgaggaaagtggcagctaaagtgagtacagtacacgagtcgcaaggagagacattcaaagatgtagtcctagtcaggacgaaacctacggatgactcaatcgctagaggtcgggagtacttaatcgtggcattgtcgcgtcacacacaatcacttgtgtatgaaactgtgaaagaggacgatgtaagcaaagagatcagggaaagtgccgcgcttacgaaggcggctttggcaagattttttgttactgagaccgtcttatgacggtttcggtctaggtttgatgtctttagacatcatgaagggccttgcgccgttccagattcaggtacgattacggacttggagatgtggtacgacgctttgtttccgggaaattcgttaagagactcaagcctagacgggtatttggtggcaacgactgattgcaatttgcgattagacaatgttacgatcaaaagtggaaactggaaagacaagtttgctgaaaaagaaacgtttctgaaaccggttattcgtactgctatgcctgacaaaaggaagactactcagttggagagtttgttagcattgcagaaaaggaaccaagcggcacccgatctacaagaaaatgtgcacgcgacagttctaatcgaagagacgatgaagaagctgaaatctgttgtctacgatgtgggaaaaattcgggctgatcctattgtcaatagagctcaaatggagagatggtggagaaatcaaagcacagcggtacaggctaaggtagtagcagatgtgagagagttacatgaaatagactattcgtcttacatgtatatgatcaaatctgacgtgaaacctaagactgatttaacaccgcaatttgaatactcagctctacagactgttgtgtatcacgagaagttgatcaactcgttgttcggtccaattttcaaagaaattaatgaacgcaagttggatgctatgcaaccacattttgtgttcaacacgagaatgacatcgagtgatttaaacgatcgagtgaagttcttaaatacggaagcggcttacgactttgttgagatagacatgtctaaattcgacaagtcggcaaatcgcttccatttacaactgcagctggagatttacaggttatttgggctggatgagtgggcggccttcctttgggaggtgtcgcacactcaaactactgtgagagatattcaaaatggtatgatggcgcatatttggtaccaacaaaagagtggagatgctgatacttataatgcaaattcagatagaacactgtgtgcactcttgtctgaattaccattggagaaagcagtcatggttacatatggaggagatgactcactgattgcgtttcctagaggaacgcagtttgttgatccgtgtccaaagttggctactaagtggaatttcgagtgcaagatttttaagtacgatgtcccaatgttttgtgggaagttcttgcttaagacgtcatcgtgttacgagttcgtgccagatccggtaaaagttctgacgaagttggggaaaaagagtataaaggatgtgcaacatttagccgagatctacatctcgctgaatgattccaatagagctcttgggaactacatggtggtatccaaactgtccgagtctgtttcagaccggtatttgtacaaaggtgattctgttcatgcgctttgtgcgctatggaagcatattaagagttttacagctctgtgtacattattccgagacgaaaacgataaggaattgaacccggctaaggttgattggaagaaggcacagagagctgtgtcaaacttttacgactggtaatatggaagacaagtcattggtcaccttgaagaagaagactttcgaagtctcaaaattctcaaatctaggggccattgaattgtttgtggacggtaggaggaagagaccgaagtattttcacagaagaagagaaactgtcctaaatcatgttggtgggaagaagagtgaacacaagttagacgtttttgaccaaagggattacaaaatgattaaatcttacgcgtttctaaaggtagtaggtgtacaactagttgtaacatcacatctacctgcagatacgcctgggttcattcaaatcgatctgttggattcgagacttactgagaaaagaaagagaggaaagactattcagagattcaaagctcgagcttgcgataactgttcagttgcgcagtacaaggttgaatacagtatttccacacaggagaacgtacttgatgtctggaaggtgggttgtatttctgagggcgttccggtctgtgacggtacataccctttcagtatcgaagtgtcgctaatatgggttgctactgattcgactaggcgcctcaatgtggaagaactgaacagttcggattacattgaaggcgattttaccgatcaagaggttttcggtgagttcatgtctttgaaacaagtggagatgaagacgattgaggcgaagtacgatggtccttacagaccagctactactagacctaagtcattattgtcaagtgaagatgttaagagagcgtctaataagaaaaactcgtcttaatgcataaagaaatttattgtcaatatgacgtgtgtactcaagggttgtgtgaatgaagtcactgttcttggtcacgagacgtgtagtatcggtcatgctaacaaattgcgaaagcaagttgctgacatggttggtgtcacacgtaggtgtgcggaaaataattgtggatggtttgtctgtgttgttatcaatgattttacttttgatgtgtataattgttgtggccgtagtcaccttgaaaagtgtcgtaaacgtgttgaaacaagaaatcgagaaatttggaaacaaattcgacgaaatcaagctgaaaacatgtctgcgacagctaaaaagtctcataattcgaagacctctaagaagaaattcaaagaggacagagaatttgggacaccaaaaagatttttaagagatgatgttcctttcgggattgatcgtttgtttgctttttgattttattttatattgttatctgtttctgtgtatagactgtttgagattggcgcttggccgactcattgtcttaccataggggaacggactttgtttgtgttgttattttatttgtattttattaaaattctcaatgatctgaaaaggcctcgaggctaagagattattggggggtgagtaagtacttttaaagtgatgatggttacaaaggcaaaaggggtaaaacccctcgcctacgtaagcgttattacgcccggatcccccggggagctcgaattcgctgaaatcaccagtctctctctacaaatctatctctctctattttttccataaataatgtgtgagtagtttcccgataagggaaattagggttcttatagggtttcgctcatgtgttgagcatataagaaacccttagtatgtatttgtatttgtaaaatacttctattatcaataaaatttctaattcctaaaaccaaaatccagtactaaaatccagatctcctaaagtccctatagatctttgtcgtgaatataaaccagacacgagacgactaaacctggagcccagacgccgttcgaagctagaagtaccgcttaggcaggaggccgttagggaaaagatgctaaggcagggttggttacgttgactcccccgtaggtttggtttaaatatgatgaagtggacggaaggaaggaggaagacaaggaaggataaggttgcaggccctgtgcaaggtaagaagatggaaatttgatagaggtacgctactatacttatactatacgctaagggaatgcttgtatttataccctataccccctaataaccccttatcaatttaagaaataatccgcataagcccccgcttaaaaattggtatcagagccatgaataggtctatgaccaaaactcaagaggataaaacctcaccaaaatacgaaagagttcttaactctaaagataaaagatctttcaagatcaaaactagttccctcacaccggagcatgcgatatcctcgacctgcaggcatgcaagcttggcgtaatcatggtcatagctgtttcctgtgtgaaattgttatccgctcacaattccacacaacatacgagccggaagcataaagtgtaaagcctggggtgcctaatgagtgagctaactcacattaattgcgttgcgctcactgcccgctttccagtcgggaaacctgtcgtgccagctgcattaatgaatcggccaacgcgcggggagaggcggtttgcgtattgggccaaagacaaaagggcgacattcaaccgattgagggagggaaggtaaatattgacggaaattattcattaaaggtgaattatcaccgtcaccgacttgagccatttgggaattagagccagcaaaatcaccagtagcaccattaccattagcaaggccggaaacgtcaccaatgaaaccatcgatagcagcaccgtaatcagtagcgacagaatcaagtttgcctttagcgtcagactgtagcgcgttttcatcggcattttcggtcatagcccccttattagcgtttgccatcttttcataatcaaaatcaccggaaccagagccaccaccggaaccgcctccctcagagccgccaccctcagaaccgccaccctcagagccaccaccctcagagccgccaccagaaccaccaccagagccgccgccagcattgacaggaggcccgatctagtaacatagatgacaccgcgcgcgataatttatcctagtttgcgcgctatattttgttttctatcgcgtattaaatgtataattgcgggactctaatcataaaaacccatctcataaataacgtcatgcattacatgttaattattacatgcttaacgtaattcaacagaaattatatgataatcatcgcaagaccggcaacaggattcaatcttaagaaactttattgccaaatgtttgaacgatcggggatcatccgggtctgtggcgggaactccacgaaaatatccgaacgcagcaagatatcgcggtgcatctcggtcttgcctgggcagtcgccgccgacgccgttgatgtggacgccgggcccgatcatattgtcgctcaggatcgtggcgttgtgcttgtcggccgttgctgtcgtaatgatatcggcaccttcgaccgcctgttccgcagagatcccgtgggcgaagaactccagcatgagatccccgcgctggaggatcatccagccggcgtcccggaaaacgattccgaagcccaacctttcatagaaggcggcggtggaatcgaaatctcgtgatggcaggttgggcgtcgcttggtcggtcatttcgaaccccagagtcccgctcagaagaactcgtcaagaaggcgatagaaggcgatgcgctgcgaatcgggagcggcgataccgtaaagcacgaggaagcggtcagcccattcgccgccaagctcttcagcaatatcacgggtagccaacgctatgtcctgatagcggtccgccacacccagccggccacagtcgatgaatccagaaaagcggccattttccaccatgatattcggcaagcaggcatcgccatgggtcacgacgagatcatcgccgtcgggcatgcgcgccttgagcctggcgaacagttcggctggcgcgagcccctgatgctcttcgtccagatcatcctgatcgacaagaccggcttccatccgagtacgtgctcgctcgatgcgatgtttcgcttggtggtcgaatgggcaggtagccggatcaagcgtatgcagccgccgcattgcatcagccatgatggatactttctcggcaggagcaaggtgagatgacaggagatcctgccccggcacttcgcccaatagcagccagtcccttcccgcttcagtgacaacgtcgagcacagctgcgcaaggaacgcccgtcgtggccagccacgatagccgcgctgcctcgtcctgcagttcattcagggcaccggacaggtcggtcttgacaaaaagaaccgggcgcccctgcgctgacagccggaacacggcggcatcagagcagccgattgtctgttgtgcccagtcatagccgaatagcctctccacccaagcggccggagaacctgcgtgcaatccatcttgttcaatcatgcgaaacgatccagatccggtgcagattatttggattgagagtgaatatgagactctaattggataccgaggggaatttatggaacgtcagtggagcatttttgacaagaaatatttgctagctgatagtgaccttaggcgacttttgaacgcgcaataatggtttctgacgtatgtgcttagctcattaaactccagaaacccgcggctgagtggctccttcaacgttgcggttctgtcagttccaaacgtaaaacggcttgtcccgcgtcatcggcgggggtcataacgtgactcccttaattctccgctcatgatcagattgtcgtttcccgccttcagtttaaactatcagtgtttgacaggatatattggcgggtaaacctaagagaaaagagcgtttattagaataatcggatatttaaaagggcgtgaaaaggtttatccgttcgtccatttgtatgtgcatgccaaccacagggttccccagatctggcgccggccagcgagacgagcaagattggccgccgcccgaaacgatccgacagcgcgcccagcacaggtgcgcaggcaaattgcaccaacgcatacagcgccagcagaatgccatagtgggcggtgacgtcgttcgagtgaaccagatcgcgcaggaggcccggcagcaccggcataatcaggccgatgccgacagcgtcgagcgcgacagtgctcagaattacgatcaggggtatgttgggtttcacgtctggcctccggaccagcctccgctggtccgattgaacgcgcggattctttatcactgataagttggtggacatattatgtttatcagtgataaagtgtcaagcatgacaaagttgcagccgaatacagtgatccgtgccgccctggacctgttgaacgaggtcggcgtagacggtctgacgacacgcaaactggcggaacggttgggggttcagcagccggcgctttactggcacttcaggaacaagcgggcgctgctcgacgcactggccgaagccatgctggcggagaatcatacgcattcggtgccgagagccgacgacgactggcgctcatttctgatcgggaatgcccgcagcttcaggcaggcgctgctcgcctaccgcgatggcgcgcgcatccatgccggcacgcgaccgggcgcaccgcagatggaaacggccgacgcgcagcttcgcttcctctgcgaggcgggtttttcggccggggacgccgtcaatgcgctgatgacaatcagctacttcactgttggggccgtgcttgaggagcaggccggcgacagcgatgccggcgagcgcggcggcaccgttgaacaggctccgctctcgccgctgttgcgggccgcgatagacgccttcgacgaagccggtccggacgcagcgttcgagcagggactcgcggtgattgtcgatggattggcgaaaaggaggctcgttgtcaggaacgttgaaggaccgagaaagggtgacgattgatcaggaccgctgccggagcgcaacccactcactacagcagagccatgtagacaacatcccctccccctttccaccgcgtcagacgcccgtagcagcccgctacgggctttttcatgccctgccctagcgtccaagcctcacggccgcgctcggcctctctggcggccttctggcgctcttccgcttcctcgctcactgactcgctgcgctcggtcgttcggctgcggcgagcggtatcagctcactcaaaggcggtaatacggttatccacagaatcaggggataacgcaggaaagaacatgtgagcaaaaggccagcaaaaggccaggaaccgtaaaaaggccgcgttgctggcgtttttccataggctccgcccccctgacgagcatcacaaaaatcgacgctcaagtcagaggtggcgaaacccgacaggactataaagataccaggcgtttccccctggaagctccctcgtgcgctctcctgttccgaccctgccgcttaccggatacctgtccgcctttctcccttcgggaagcgtggcgcttttccgctgcataaccctgcttcggggtcattatagcgattttttcggtatatccatcctttttcgcacgatatacaggattttgccaaagggttcgtgtagactttccttggtgtatccaacggcgtcagccgggcaggataggtgaagtaggcccacccgcgagcgggtgttccttcttcactgtcccttattcgcacctggcggtgctcaacgggaatcctgctctgcgaggctggccggctaccgccggcgtaacagatgagggcaagcggatggctgatgaaaccaagccaaccaggaagggcagcccacctatcaaggtgtactgccttccagacgaacgaagagcgattgaggaaaaggcggcggcggccggcatgagcctgtcggcctacctgctggccgtcggccagggctacaaaatcacgggcgtcgtggactatgagcacgtccgcgagctggcccgcatcaatggcgacctgggccgcctgggcggcctgctgaaactctggctcaccgacgacccgcgcacggcgcggttcggtgatgccacgatcctcgccctgctggcgaagatcgaagagaagcaggacgagcttggcaaggtcatgatgggcgtggtccgcccgagggcagagccatgacttttttagccgctaaaacggccggggggtgcgcgtgattgccaagcacgtccccatgcgctccatcaagaagagcgacttcgcggagctggtgaagtacatcaccgacgagcaaggcaagaccgagcgcctttgcgacgctcaccgggctggttgccctcgccgctgggctggcggccgtctatggccctgcaaacgcgccagaaacgccgtcgaagccgtgtgcgagacaccgcggccgccggcgttgtggatacctcgcggaaaacttggccctcactgacagatgaggggcggacgttgacacttgaggggccgactcacccggcgcggcgttgacagatgaggggcaggctcgatttcggccggcgacgtggagctggccagcctcgcaaatcggcgaaaacgcctgattttacgcgagtttcccacagatgatgtggacaagcctggggataagtgccctgcggtattgacacttgaggggcgcgactactgacagatgaggggcgcgatccttgacacttgaggggcagagtgctgacagatgaggggcgcacctattgacatttgaggggctgtccacaggcagaaaatccagcatttgcaagggtttccgcccgtttttcggccaccgctaacctgtcttttaacctgcttttaaaccaatatttataaaccttgtttttaaccagggctgcgccctgtgcgcgtgaccgcgcacgccgaaggggggtgcccccccttctcgaaccctcccggcccgctaacgcgggcctcccatccccccaggggctgcgcccctcggccgcgaacggcctcaccccaaaaatggcagcgctggcagtccttgccattgccgggatcggggcagtaacgggatgggcgatcagcccgagcgcgacgcccggaagcattgacgtgccgcaggtgctggcatcgacattcagcgaccaggtgccgggcagtgagggcggcggcctgggtggcggcctgcccttcacttcggccgtcggggcattcacggacttcatggcggggccggcaatttttaccttgggcattcttggcatagtggtcgcgggtgccgtgctcgtgttcgggggtgcgataaacccagcgaaccatttgaggtgataggtaagattataccgaggtatgaaaacgagaattggacctttacagaattactctatgaagcgccatatttaaaaagctaccaagacgaagaggatgaagaggatgaggaggcagattgccttgaatatattgacaatactgataagataatatatcttttatatagaagatatcgccgtatgtaaggatttcagggggcaaggcataggcagcgcgcttatcaatatatctatagaatgggcaaagcataaaaacttgcatggactaatgcttgaaacccaggacaataaccttatagcttgtaaattctatcataattgggtaatgactccaacttattgatagtgttttatgttcagataatgcccgatgactttgtcatgcagctccaccgattttgagaacgacagcgacttccgtcccagccgtgccaggtgctgcctcagattcaggttatgccgctcaattcgctgcgtatatcgcttgctgattacgtgcagctttcccttcaggcgggattcatacagcggccagccatccgtcatccatatcaccacgtcaaagggtgacagcaggctcataagacgccccagcgtcgccatagtgcgttcaccgaatacgtgcgcaacaaccgtcttccggagactgtcatacgcgtaaaacagccagcgctggcgcgatttagccccgacatagccccactgttcgtccatttccgcgcagacgatgacgtcactgcccggctgtatgcgcgaggttaccgactgcggcctgagttttttaagtgacgtaaaatcgtgttgaggccaacgcccataatgcgggctgttgcccggcatccaacgccattcatggccatatcaatgattttctggtgcgtaccgggttgagaagcggtgtaagtgaactgcagttgccatgttttacggcagtgagagcagagatagcgctgatgtccggcggtgcttttgccgttacgcaccaccccgtcagtagctgaacaggagggacagctgatagacacagaagccactggagcacctcaaaaacaccatcatacactaaatcagtaagttggcagcatcacccataattgtggtttcaaaatcggctccgtcgatactatgttatacgccaactttgaaaacaactttgaaaaagctgttttctggtatttaaggttttagaatgcaaggaacagtgaattggagttcgtcttgttataattagcttcttggggtatctttaaatactgtagaaaagaggaaggaaataataaatggctaaaatgagaatatcaccggaattgaaaaaactgatcgaaaaataccgctgcgtaaaagatacggaaggaatgtctcctgctaaggtatataagctggtgggagaaaatgaaaacctatatttaaaaatgacggacagccggtataaagggaccacctatgatgtggaacgggaaaaggacatgatgctatggctggaaggaaagctgcctgttccaaaggtcctgcactttgaacggcatgatggctggagcaatctgctcatgagtgaggccgatggcgtcctttgctcggaagagtatgaagatgaacaaagccctgaaaagattatcgagctgtatgcggagtgcatcaggctctttcactccatcgacatatcggattgtccctatacgaatagcttagacagccgcttagccgaattggattacttactgaataacgatctggccgatgtggattgcgaaaactgggaagaagacactccatttaaagatccgcgcgagctgtatgattttttaaagacggaaaagcccgaagaggaacttgtcttttcccacggcgacctgggagacagcaacatctttgtgaaagatggcaaagtaagtggctttattgatcttgggagaagcggcagggcggacaagtggtatgacattgccttctgcgtccggtcgatcagggaggatatcggggaagaacagtatgtcgagctattttttgacttactggggatcaagcctgattgggagaaaataaaatattatattttactggatgaattgttttagtacctagatgtggcgcaacgatgccggcgacaagcaggagcgcaccgacttcttccgcatcaagtgttttggctctcaggccgaggcccacggcaagtatttgggcaaggggtcgctggtattcgtgcagggcaagattcggaataccaagtacgagaaggacggccagacggtctacgggaccgacttcattgccgataaggtggattatctggacaccaaggcaccaggcgggtcaaatcaggaataagggcacattgccccggcgtgagtcggggcaatcccgcaaggagggtgaatgaatcggacgtttgaccggaaggcatacaggcaagaactgatcgacgcggggttttccgccgaggatgccgaaaccatcgcaagccgcaccgtcatgcgtgcgccccgcgaaaccttccagtccgtcggctcgatggtccagcaagctacggccaagatcgagcgcgacagcgtgcaactggctccccctgccctgcccgcgccatcggccgccgtggagcgttcgcgtcgtctcgaacaggaggcggcaggtttggcgaagtcgatgaccatcgacacgcgaggaactatgacgaccaagaagcgaaaaaccgccggcgaggacctggcaaaacaggtcagcgaggccaagcaggccgcgttgctgaaacacacgaagcagcagatcaaggaaatgcagctttccttgttcgatattgcgccgtggccggacacgatgcgagcgatgccaaacgacacggcccgctctgccctgttcaccacgcgcaacaagaaaatcccgcgcgaggcgctgcaaaacaaggtcattttccacgtcaacaaggacgtgaagatcacctacaccggcgtcgagctgcgggccgacgatgacgaactggtgtggcagcaggtgttggagtacgcgaagcgcacccctatcggcgagccgatcaccttcacgttctacgagctttgccaggacctgggctggtcgatcaatggccggtattacacgaaggccgaggaatgcctgtcgcgcctacaggcgacggcgatgggcttcacgtccgaccgcgttgggcacctggaatcggtgtcgctgctgcaccgcttccgcgtcctggaccgtggcaagaaaacgtcccgttgccaggtcctgatcgacgaggaaatcgtcgtgctgtttgctggcgaccactacacgaaattcatatgggagaagtaccgcaagctgtcgccgacggcccgacggatgttcgactatttcagctcgcaccgggagccgtacccgctcaagctggaaaccttccgcctcatgtgcggatcggattccacccgcgtgaagaagtggcgcgagcaggtcggcgaagcctgcgaagagttgcgaggcagcggcctggtggaacacgcctgggtcaatgatgacctggtgcattgcaaacgctagggccttgtggggtcagttccggctgggggttcagcagccagcgctttactggcatttcaggaacaagcgggcactgctcgacgcacttgcttcgctcagtatcgctcgggacgcacggcgcgctctacgaactgccgataaacagaggattaaaattgacaattgtgattaaggctcagattcgacggcttggagcggccgacgtgcaggatttccgcgagatccgattgtcggccctgaagaaagctccagagatgttcgggtccgtttacgagcacgaggagaaaaagcccatggaggcgttcgctgaacggttgcgagatgccgtggcattcggcgcctacatcgacggcgagatcattgggctgtcggtcttcaaacaggaggacggccccaaggacgctcacaaggcgcatctgtccggcgttttcgtggagcccgaacagcgaggccgaggggtcgccggtatgctgctgcgggcgttgccggcgggtttattgctcgtgatgatcgtccgacagattccaacgggaatctggtggatgcgcatcttcatcctcggcgcacttaatatttcgctattctggagcttgttgtttatttcggtctaccgcctgccgggcggggtcgcggcgacggtaggcgctgtgcagccgctgatggtcgtgttcatctctgccgctctgctaggtagcccgatacgattgatggcggtcctgggggctatttgcggaactgcgggcgtggcgctgttggtgttgacaccaaacgcagcgctagatcctgtcggcgtcgcagcgggcctggcgggggcggtttccatggcgttcggaaccgtgctgacccgcaagtggcaacctcccgtgcctctgctcacctttaccgcctggcaactggcggccggaggacttctgctcgttccagtagctttagtgtttgatccgccaatcccgatgcctacaggaaccaatgttctcggcctggcgtggctcggcctgatcggagcgggtttaacctacttcctttggttccgggggatctcgcgactcgaacctacagttgtttccttactgggctttctcagccccagatctggggtcgatcagccggggatgcatcaggccgacagtcggaacttcgggtccccgacctgtaccattcggtgagcaatggataggggagttgatatcgtcaacgttcacttctaaagaaatagcgccactcagcttcctcagcggctttatccagcgatttcctattatgtcggcatagttctcaagatcgacagcctgtcacggttaagcgagaaatgaataagaaggctgataattcggatctctgcgagggagatgatatttgatcacaggcagcaacgctctgtcatcgttacaatcaacatgctaccctccgcgagatcatccgtgtttcaaacccggcagcttagttgccgttcttccgaatagcatcggtaacatgagcaaagtctgccgccttacaacggctctcccgctgacgccgtcccggactgatgggctgcctgtatcgagtggtgattttgtgccgagctgccggtcggggagctgttggctggctggtggcaggatatattgtggtgtaaacaaattgacgcttagacaacttaataacacattgcggacgtttttaatgtactggggtggtttttcttttcaccagtgagacgggcaacagctgattgcccttcaccgcctggccctgagagagttgcagcaagcggtccacgctggtttgccccagcaggcgaaaatcctgtttgatggtggttccgaaatcggcaaaatcccttataaatcaaaagaatagcccgagatagggttgagtgttgttccagtttggaacaagagtccactattaaagaacgtggactccaacgtcaaagggcgaaaaaccgtctatcagggcgatggcccactacgtgaaccatcacccaaatcaagttttttggggtcgaggtgccgtaaagcactaaatcggaaccctaaagggagcccccgatttagagcttgacggggaaagccggcgaacgtggcgagaaaggaagggaagaaagcgaaaggagcgggcgccattcaggctgcgcaactgttgggaagggcgatcggtgcgggcctcttcgctattacgccagctggcgaaagggggatgtgctgcaaggcgattaagttgggtaacgccagggttttcccagtcacgacgttgtaaaacgacggccagtgaattcgagctcggtacccccctactccaaaaatgtcaaagatacagtctcagaagaccaaagggctattgagacttttcaacaaagggtaatttcgggaaacctcctcggattccattgcccagctatctgtcacttcatcgaaaggacagtagaaaaggaaggtggctcctacaaatgccatcattgcgataaaggaaaggctatcattcaagatgcctctgccgacagtggtcccaaagatggacccccacccacgaggagcatcgtggaaaaagaagacgtcccaaccacgtcttcaaagcaagtggattgatgtgacatctccactgacgtaagggatgacgcacaatcccactatccttcgcaagacccttcttctatataaggaagttcatttcatttggagaggacagcccaagctttctagaggatccataaaacatttcaatcctttgaacgcggtagaacgtgctaattggattttggtgagaacgcggtagaacgtacttatcacctacagttttattttgtttttctttttggtttaatctatccagcttagtaccgagtgggggaaagtgactggtgtgcctaaaaccttttctttgatactttgtaaaaatacatacagatacaatggcgaacggtaacttcaagttgtctcaattgctcaatgtggacgagatgtctgctgagcagaggagtcatttctttgacttgatgctgactaaacctgattgtgagatcgggcaaatgatgcaaagagttgttgttgataaagtcgatgacatgattagagaaagaaagactaaagatccagtgattgttcatgaagttctttctcagaaggaacagaacaagttgatggaaatttatcctgaattcaatatcgtgtttaaagacgacaaaaacatggttcatgggtttgcggctgctgagcgaaaactacaagctttattgcttttagatagagttcctgctctgcaagaggtggatgacatcggtggtcaatggtcgttttgggtaactagaggtgagaaaaggattcattcctgttgtccaaatctagatattcgggatgatcagagagaaatttctcgacagatatttcttactgctattggtgatcaagctagaagtggtaagagacagatgtcggagaatgagctgtggatgtatgaccaatttcgtgaaaatattgctgcgcctaacgcggttaggtgcaataatacatatcagggttgtacatgtaggggtttt

SEQ ID NO: 571 - DNA, 9945 bp, Artificial sequence
  TRV2_ Nitab4.5_0002539g0040.2
ataaaacattgcacctatggtgttgccctggctggggtatgtcagtgatcgcagtagaatgtactaattgacaagttggagaatacggtagaacgtccttatccaacacagcctttatccctctccctgacgaggtttttgtcagtgtaatatttctttttgaactatccagcttagtaccgtacgggaaagtgactggtgtgcttatctttgaaatgttactttgggtttcggttctttaggttagtaagaaagcacttgtcttctcatacaaaggaaaacctgagacgtatcgcttacgaaagtagcaatgaaagaaaggtggtggttttaatcgctaccgcaaaaacgatggggtcgttttaattaacttctcctacgcaagcgtctaaacggacgttggggttttgctagtttctttagagaaaactagctaagtctttaatgttatcattagagatggcataaatataatacttgtgtctgctgataagatcattttaatttggacgattagacttgttgaactacaggttactgaatcacttgcgctaatcaacatgggagatatgtacgatgaatcatttgacaagtcgggcggtcctgctgacttgatggacgattcttgggtggaatcagtttcgtggaaagatctgttgaagaagttacacagcataaaatttgcactacagtctggtagagatgagatcactgggttactagcggcactgaatagacagtgtccttattcaccatatgagcagtttccagataagaaggtgtatttccttttagactcacgggctaacagtgctcttggtgtgattcagaacgcttcagcgttcaagagacgagctgatgagaagaatgcagtggcgggtgttacaaatattcctgcgaatccaaacacaacggttacgacgaaccaagggagtactactactaccaaggcgaacactggctcgactttggaagaagacttgtacacttattacaaattcgatgatgcctctacagctttccacaaatctctaacttcgttagagaacatggagttgaagagttattaccgaaggaactttgagaaagtattcgggattaagtttggtggagcagctgctagttcatctgcaccgcctccagcgagtggaggtccgatacgtcctaatccctagggatttaaggacgtgaactctgttgagatctctgtgaaattcagagggtgggtgataccatattcactgatgccattagcgacatctaaatagggctaattgtgactaatttgagggaatttcctttaccattgacgtcagtgtcgttggtagcatttgagtttcgcaatgcacgaattacttaggaagtggcttgacgacactaatgtgttattgttagataatggtttggtggtcaaggtacgtagtagagtcccacatattcgcacgtatgaagtaattggaaagttgtcagtttttgataattcactgggagatgatacgctgtttgagggaaaagtagagaacgtatttgtttttatgttcaggcggttcttgtgtgtcaacaaagatggacattgttactcaaggaagcacgatgagctttattattacggacgagtggacttagattctgtgagtaaggttaccgaattccccggaacaactactacaccaactccccggagttcagtttctccagcgccggcgccggtgacggggattgccggagacccattaaagtctatgccatatttcaaccaagagtcactgcaacagcgactccagactttaatcgatggggctcgcgaagggtggacgtatgccatattttggcaatcgtctgttgtggatttcgcgagcccctcggttttggggtggggagatgggtattataaaggtgaagaagataaaaataagcgtaaaacggcgtcgttttcgcctgactttatcacgggatccggtaccgagctcacgcgtctcgaggcccgggcatgtcccgaagacattaaactacggttctttaagtagatccgtgtctgaagttttaggttcaatttaaacctacgagattgacattctcgactgatcttgattgatcggtaagtcttttgtaatttaattttctttttgattttattttaaattgttatctgtttctgtgtatagactgtttgagatcggcgtttggccgactcattgtcttaccataggggaacggactttgtttgtgttgttattttatttgtattttattaaaattctcaacgatctgaaaaagcctcgcggctaagagattgttggggggtgagtaagtacttttaaagtgatgatggttacaaaggcaaaaggggtaaaacccctcgcctacgtaagcgttattacgcccgtctgtacttatatcagtacactgacgagtccctaaaggacgaaacgggagaacgctagccaccaccaccaccaccacgtgtgaattacaggtgaccagctcgaatttccccgatcgttcaaacatttggcaataaagtttcttaagattgaatcctgttgccggtcttgcgatgattatcatataatttctgttgaattacgttaagcatgtaataattaacatgtaatgcatgacgttatttatgagatgggtttttatgattagagtcccgcaattatacatttaatacgcgatagaaaacaaaatatagcgcgcaaactaggataaattatcgcgcgcggtgtcatctatgttactagatcgggaattaaactatcagtgtttgacaggatatattggcgggtaaacctaagagaaaagagcgtttattagaataacggatatttaaaagggcgtgaaaaggtttatccgttcgtccatttgtatgtgcatgccaaccacagggttcccctcgggatcaaagtactttgatccaacccctccgctgctatagtgcagtcggcttctgacgttcagtgcagccgtcttctgaaaacgacatgtcgcacaagtcctaagttacgcgacaggctgccgccctgcccttttcctggcgttttcttgtcgcgtgttttagtcgcataaagtagaatacttgcgactagaaccggagacattacgccatgaacaagagcgccgccgctggcctgctgggctatgcccgcgtcagcaccgacgaccaggacttgaccaaccaacgggccgaactgcacgcggccggctgcaccaagctgttttccgagaagatcaccggcaccaggcgcgaccgcccggagctggccaggatgcttgaccacctacgccctggcgacgttgtgacagtgaccaggctagaccgcctggcccgcagcacccgcgacctactggacattgccgagcgcatccaggaggccggcgcgggcctgcgtagcctggcagagccgtgggccgacaccaccacgccggccggccgcatggtgttgaccgtgttcgccggcattgccgagttcgagcgttccctaatcatcgaccgcacccggagcgggcgcgaggccgccaaggcccgaggcgtgaagtttggcccccgccctaccctcaccccggcacagatcgcgcacgcccgcgagctgatcgaccaggaaggccgcaccgtgaaagaggcggctgcactgcttggcgtgcatcgctcgaccctgtaccgcgcacttgagcgcagcgaggaagtgacgcccaccgaggccaggcggcgcggtgccttccgtgaggacgcattgaccgaggccgacgccctggcggccgccgagaatgaacgccaagaggaacaagcatgaaaccgcaccaggacggccaggacgaaccgtttttcattaccgaagagatcgaggcggagatgatcgcggccgggtacgtgttcgagccgcccgcgcacgtctcaaccgtgcggctgcatgaaatcctggccggtttgtctgatgccaagctggcggcctggccggccagcttggccgctgaagaaaccgagcgccgccgtctaaaaaggtgatgtgtatttgagtaaaacagcttgcgtcatgcggtcgctgcgtatatgatgcgatgagtaaataaacaaatacgcaaggggaacgcatgaaggttatcgctgtacttaaccagaaaggcgggtcaggcaagacgaccatcgcaacccatctagcccgcgccctgcaactcgccggggccgatgttctgttagtcgattccgatccccagggcagtgcccgcgattgggcggccgtgcgggaagatcaaccgctaaccgttgtcggcatcgaccgcccgacgattgaccgcgacgtgaaggccatcggccggcgcgacttcgtagtgatcgacggagcgccccaggcggcggacttggctgtgtccgcgatcaaggcagccgacttcgtgctgattccggtgcagccaagcccttacgacatatgggccaccgccgacctggtggagctggttaagcagcgcattgaggtcacggatggaaggctacaagcggcctttgtcgtgtcgcgggcgatcaaaggcacgcgcatcggcggtgaggttgccgaggcgctggccgggtacgagctgcccattcttgagtcccgtatcacgcagcgcgtgagctacccaggcactgccgccgccggcacaaccgttcttgaatcagaacccgagggcgacgctgcccgcgaggtccaggcgctggccgctgaaattaaatcaaaactcatttgagttaatgaggtaaagagaaaatgagcaaaagcacaaacacgctaagtgccggccgtccgagcgcacgcagcagcaaggctgcaacgttggccagcctggcagacacgccagccatgaagcgggtcaactttcagttgccggcggaggatcacaccaagctgaagatgtacgcggtacgccaaggcaagaccattaccgagctgctatctgaatacatcgcgcagctaccagagtaaatgagcaaatgaataaatgagtagatgaattttagcggctaaaggaggcggcatggaaaatcaagaacaaccaggcaccgacgccgtggaatgccccatgtgtggaggaacgggcggttggccaggcgtaagcggctgggttgtctgccggccctgcaatggcactggaacccccaagcccgaggaatcggcgtgacggtcgcaaaccatccggcccggtacaaatcggcgcggcgctgggtgatgacctggtggagaagttgaaggccgcgcaggccgcccagcggcaacgcatcgaggcagaagcacgccccggtgaatcgtggcaagcggccgctgatcgaatccgcaaagaatcccggcaaccgccggcagccggtgcgccgtcgattaggaagccgcccaagggcgacgagcaaccagattttttcgttccgatgctctatgacgtgggcacccgcgatagtcgcagcatcatggacgtggccgttttccgtctgtcgaagcgtgaccgacgagctggcgaggtgatccgctacgagcttccagacgggcacgtagaggtttccgcagggccggccggcatggccagtgtgtgggattacgacctggtactgatggcggtttcccatctaaccgaatccatgaaccgataccgggaagggaagggagacaagcccggccgcgtgttccgtccacacgttgcggacgtactcaagttctgccggcgagccgatggcggaaagcagaaagacgacctggtagaaacctgcattcggttaaacaccacgcacgttgccatgcagcgtacgaagaaggccaagaacggccgcctggtgacggtatccgagggtgaagccttgattagccgctacaagatcgtaaagagcgaaaccgggcggccggagtacatcgagatcgagctagctgattggatgtaccgcgagatcacagaaggcaagaacccggacgtgctgacggttcaccccgattactttttgatcgatcccggcatcggccgttttctctaccgcctggcacgccgcgccgcaggcaaggcagaagccagatggttgttcaagacgatctacgaacgcagtggcagcgccggagagttcaagaagttctgtttcaccgtgcgcaagctgatcgggtcaaatgacctgccggagtacgatttgaaggaggaggcggggcaggctggcccgatcctagtcatgcgctaccgcaacctgatcgagggcgaagcatccgccggttcctaatgtacggagcagatgctagggcaaattgccctagcaggggaaaaaggtcgaaaaggtctctttcctgtggatagcacgtacattgggaacccaaagccgtacattgggaaccggaacccgtacattgggaacccaaagccgtacattgggaaccggtcacacatgtaagtgactgatataaaagagaaaaaaggcgatttttccgcctaaaactctttaaaacttattaaaactcttaaaacccgcctggcctgtgcataactgtctggccagcgcacagccgaagagctgcaaaaagcgcctacccttcggtcgctgcgctccctacgccccgccgcttcgcgtcggcctatcgcggccgctggccgctcaaaaatggctggcctacggccaggcaatctaccagggcgcggacaagccgcgccgtcgccactcgaccgccggcgcccacatcaaggcaccctgcctcgcgcgtttcggtgatgacggtgaaaacctctgacacatgcagctcccggagacggtcacagcttgtctgtaagcggatgccgggagcagacaagcccgtcagggcgcgtcagcgggtgttggcgggtgtcggggcgcagccatgacccagtcacgtagcgatagcggagtgtatactggcttaactatgcggcatcagagcagattgtactgagagtgcaccatatgcggtgtgaaataccgcacagatgcgtaaggagaaaataccgcatcaggcgctcttccgcttcctcgctcactgactcgctgcgctcggtcgttcggctgcggcgagcggtatcagctcactcaaaggcggtaatacggttatccacagaatcaggggataacgcaggaaagaacatgtgagcaaaaggccagcaaaaggccaggaaccgtaaaaaggccgcgttgctggcgtttttccataggctccgcccccctgacgagcatcacaaaaatcgacgctcaagtcagaggtggcgaaacccgacaggactataaagataccaggcgtttccccctggaagctccctcgtgcgctctcctgttccgaccctgccgcttaccggatacctgtccgcctttctcccttcgggaagcgtggcgctttctcatagctcacgctgtaggtatctcagttcggtgtaggtcgttcgctccaagctgggctgtgtgcacgaaccccccgttcagcccgaccgctgcgccttatccggtaactatcgtcttgagtccaacccggtaagacacgacttatcgccactggcagcagccactggtaacaggattagcagagcgaggtatgtaggcggtgctacagagttcttgaagtggtggcctaactacggctacactagaaggacagtatttggtatctgcgctctgctgaagccagttaccttcggaaaaagagttggtagctcttgatccggcaaacaaaccaccgctggtagcggtggtttttttgtttgcaagcagcagattacgcgcagaaaaaaaggatctcaagaagatcctttgatcttttctacggggtctgacgctcagtggaacgaaaactcacgttaagggattttggtcatgcattctaggtactaaaacaattcatccagtaaaatataatattttattttctcccaatcaggcttgatccccagtaagtcaaaaaatagctcgacatactgttcttccccgatatcctccctgatcgaccggacgcagaaggcaatgtcataccacttgtccgccctgccgcttctcccaagatcaataaagccacttactttgccatctttcacaaagatgttgctgtctcccaggtcgccgtgggaaaagacaagttcctcttcgggcttttccgtctttaaaaaatcatacagctcgcgcggatctttaaatggagtgtcttcttcccagttttcgcaatccacatcggccagatcgttattcagtaagtaatccaattcggctaagcggctgtctaagctattcgtatagggacaatccgatatgtcgatggagtgaaagagcctgatgcactccgcatacagctcgataatcttttcagggctttgttcatcttcatactcttccgagcaaaggacgccatcggcctcactcatgagcagattgctccagccatcatgccgttcaaagtgcaggacctttggaacaggcagctttccttccagccatagcatcatgtccttttcccgttccacatcataggtggtccctttataccggctgtccgtcatttttaaatataggttttcattttctcccaccagcttatataccttagcaggagacattccttccgtatcttttacgcagcggtatttttcgatcagttttttcaattccggtgatattctcattttagccatttattatttccttcctcttttctacagtatttaaagataccccaagaagctaattataacaagacgaactccaattcactgttccttgcattctaaaaccttaaataccagaaaacagctttttcaaagttgttttcaaagttggcgtataacatagtatcgacggagccgattttgaaaccgcggtgatcacaggcagcaacgctctgtcatcgttacaatcaacatgctaccctccgcgagatcatccgtgtttcaaacccggcagcttagttgccgttcttccgaatagcatcggtaacatgagcaaagtctgccgccttacaacggctctcccgctgacgccgtcccggactgatgggctgcctgtatcgagtggtgattttgtgccgagctgccggtcggggagctgttggctggctggtggcaggatatattgtggtgtaaacaaattgacgcttagacaacttaataacacattgcggacgtttttaatgtactgaattaacgccgaattaattcctaggccaccatgttgggcccggcgcgccaagcttgcatgcctgcaggtcaacatggtggagcacgacactctcgtctactccaagaatatcaaagatacagtctcagaagaccagagggctattgagacttttcaacaaagggtaatatcgggaaacctcctcggattccattgcccagctatctgtcacttcatcgaaaggacagtagaaaaggaagatggcttctacaaatgccatcattgcgataaaggaaaggctatcgttcaagatgcctctaccgacagtggtcccaaagatggacccccacccacgaggaacatcgtggaaaaagaagacgttccaaccacgtcttcaaagcaagtggattgatgtgatggtcaacatggtggagcacgacactctcgtctactccaagaatatcaaagatacagtctcagaagaccagagggctattgagacttttcaacaaagggtaatatcgggaaacctcctcggattccattgcccagctatctgtcacttcatcgaaaggacagtagaaaaggaagatggcttctacaaatgccatcattgcgataaaggaaaggctatcgttcaagatgcctctaccgacagtggtcccaaagatggacccccacccacgaggaacatcgtggaaaaagaagacgttccaaccacgtcttcaaagcaagtggattgatgtgatatctccactgacgtaagggatgacgcacaatcccactatccttcgcaagacccttcctctatataaggaagttcatttcatttggagagg

SEQ ID NO: 572 - DNA, 9945 bp, Artificial sequence
  TRV2_ Nitab4.5_0002683g0080.2
ataaaacattgcacctatggtgttgccctggctggggtatgtcagtgatcgcagtagaatgtactaattgacaagttggagaatacggtagaacgtccttatccaacacagcctttatccctctccctgacgaggtttttgtcagtgtaatatttctttttgaactatccagcttagtaccgtacgggaaagtgactggtgtgcttatctttgaaatgttactttgggtttcggttctttaggttagtaagaaagcacttgtcttctcatacaaaggaaaacctgagacgtatcgcttacgaaagtagcaatgaaagaaaggtggtggttttaatcgctaccgcaaaaacgatggggtcgttttaattaacttctcctacgcaagcgtctaaacggacgttggggttttgctagtttctttagagaaaactagctaagtctttaatgttatcattagagatggcataaatataatacttgtgtctgctgataagatcattttaatttggacgattagacttgttgaactacaggttactgaatcacttgcgctaatcaacatgggagatatgtacgatgaatcatttgacaagtcgggcggtcctgctgacttgatggacgattcttgggtggaatcagtttcgtggaaagatctgttgaagaagttacacagcataaaatttgcactacagtctggtagagatgagatcactgggttactagcggcactgaatagacagtgtccttattcaccatatgagcagtttccagataagaaggtgtatttccttttagactcacgggctaacagtgctcttggtgtgattcagaacgcttcagcgttcaagagacgagctgatgagaagaatgcagtggcgggtgttacaaatattcctgcgaatccaaacacaacggttacgacgaaccaagggagtactactactaccaaggcgaacactggctcgactttggaagaagacttgtacacttattacaaattcgatgatgcctctacagctttccacaaatctctaacttcgttagagaacatggagttgaagagttattaccgaaggaactttgagaaagtattcgggattaagtttggtggagcagctgctagttcatctgcaccgcctccagcgagtggaggtccgatacgtcctaatccctagggatttaaggacgtgaactctgttgagatctctgtgaaattcagagggtgggtgataccatattcactgatgccattagcgacatctaaatagggctaattgtgactaatttgagggaatttcctttaccattgacgtcagtgtcgttggtagcatttgagtttcgcaatgcacgaattacttaggaagtggcttgacgacactaatgtgttattgttagataatggtttggtggtcaaggtacgtagtagagtcccacatattcgcacgtatgaagtaattggaaagttgtcagtttttgataattcactgggagatgatacgctgtttgagggaaaagtagagaacgtatttgtttttatgttcaggcggttcttgtgtgtcaacaaagatggacattgttactcaaggaagcacgatgagctttattattacggacgagtggacttagattctgtgagtaaggttaccgaattcagtggaataaaacaatttatagtacattactgtgattgtgatttcaaaccagccgaagaaggaagcggacggtttgaccctctgccaaatctggaatatctctgcctcgccgggataaataatttagagagtgtatctgatatcagtcatcttctgggtctaagattttctaaattatgcagactagatatttcggattgtcatagattgagatgtctgtttaacgttggtggagctttttctgtaccaaatcacatggaacatattaaaattcactattgtactgagctggtagagttgggatccggtaccgagctcacgcgtctcgaggcccgggcatgtcccgaagacattaaactacggttctttaagtagatccgtgtctgaagttttaggttcaatttaaacctacgagattgacattctcgactgatcttgattgatcggtaagtcttttgtaatttaattttctttttgattttattttaaattgttatctgtttctgtgtatagactgtttgagatcggcgtttggccgactcattgtcttaccataggggaacggactttgtttgtgttgttattttatttgtattttattaaaattctcaacgatctgaaaaagcctcgcggctaagagattgttggggggtgagtaagtacttttaaagtgatgatggttacaaaggcaaaaggggtaaaacccctcgcctacgtaagcgttattacgcccgtctgtacttatatcagtacactgacgagtccctaaaggacgaaacgggagaacgctagccaccaccaccaccaccacgtgtgaattacaggtgaccagctcgaatttccccgatcgttcaaacatttggcaataaagtttcttaagattgaatcctgttgccggtcttgcgatgattatcatataatttctgttgaattacgttaagcatgtaataattaacatgtaatgcatgacgttatttatgagatgggtttttatgattagagtcccgcaattatacatttaatacgcgatagaaaacaaaatatagcgcgcaaactaggataaattatcgcgcgcggtgtcatctatgttactagatcgggaattaaactatcagtgtttgacaggatatattggcgggtaaacctaagagaaaagagcgtttattagaataacggatatttaaaagggcgtgaaaaggtttatccgttcgtccatttgtatgtgcatgccaaccacagggttcccctcgggatcaaagtactttgatccaacccctccgctgctatagtgcagtcggcttctgacgttcagtgcagccgtcttctgaaaacgacatgtcgcacaagtcctaagttacgcgacaggctgccgccctgcccttttcctggcgttttcttgtcgcgtgttttagtcgcataaagtagaatacttgcgactagaaccggagacattacgccatgaacaagagcgccgccgctggcctgctgggctatgcccgcgtcagcaccgacgaccaggacttgaccaaccaacgggccgaactgcacgcggccggctgcaccaagctgttttccgagaagatcaccggcaccaggcgcgaccgcccggagctggccaggatgcttgaccacctacgccctggcgacgttgtgacagtgaccaggctagaccgcctggcccgcagcacccgcgacctactggacattgccgagcgcatccaggaggccggcgcgggcctgcgtagcctggcagagccgtgggccgacaccaccacgccggccggccgcatggtgttgaccgtgttcgccggcattgccgagttcgagcgttccctaatcatcgaccgcacccggagcgggcgcgaggccgccaaggcccgaggcgtgaagtttggcccccgccctaccctcaccccggcacagatcgcgcacgcccgcgagctgatcgaccaggaaggccgcaccgtgaaagaggcggctgcactgcttggcgtgcatcgctcgaccctgtaccgcgcacttgagcgcagcgaggaagtgacgcccaccgaggccaggcggcgcggtgccttccgtgaggacgcattgaccgaggccgacgccctggcggccgccgagaatgaacgccaagaggaacaagcatgaaaccgcaccaggacggccaggacgaaccgtttttcattaccgaagagatcgaggcggagatgatcgcggccgggtacgtgttcgagccgcccgcgcacgtctcaaccgtgcggctgcatgaaatcctggccggtttgtctgatgccaagctggcggcctggccggccagcttggccgctgaagaaaccgagcgccgccgtctaaaaaggtgatgtgtatttgagtaaaacagcttgcgtcatgcggtcgctgcgtatatgatgcgatgagtaaataaacaaatacgcaaggggaacgcatgaaggttatcgctgtacttaaccagaaaggcgggtcaggcaagacgaccatcgcaacccatctagcccgcgccctgcaactcgccggggccgatgttctgttagtcgattccgatccccagggcagtgcccgcgattgggcggccgtgcgggaagatcaaccgctaaccgttgtcggcatcgaccgcccgacgattgaccgcgacgtgaaggccatcggccggcgcgacttcgtagtgatcgacggagcgccccaggcggcggacttggctgtgtccgcgatcaaggcagccgacttcgtgctgattccggtgcagccaagcccttacgacatatgggccaccgccgacctggtggagctggttaagcagcgcattgaggtcacggatggaaggctacaagcggcctttgtcgtgtcgcgggcgatcaaaggcacgcgcatcggcggtgaggttgccgaggcgctggccgggtacgagctgcccattcttgagtcccgtatcacgcagcgcgtgagctacccaggcactgccgccgccggcacaaccgttcttgaatcagaacccgagggcgacgctgcccgcgaggtccaggcgctggccgctgaaattaaatcaaaactcatttgagttaatgaggtaaagagaaaatgagcaaaagcacaaacacgctaagtgccggccgtccgagcgcacgcagcagcaaggctgcaacgttggccagcctggcagacacgccagccatgaagcgggtcaactttcagttgccggcggaggatcacaccaagctgaagatgtacgcggtacgccaaggcaagaccattaccgagctgctatctgaatacatcgcgcagctaccagagtaaatgagcaaatgaataaatgagtagatgaattttagcggctaaaggaggcggcatggaaaatcaagaacaaccaggcaccgacgccgtggaatgccccatgtgtggaggaacgggcggttggccaggcgtaagcggctgggttgtctgccggccctgcaatggcactggaacccccaagcccgaggaatcggcgtgacggtcgcaaaccatccggcccggtacaaatcggcgcggcgctgggtgatgacctggtggagaagttgaaggccgcgcaggccgcccagcggcaacgcatcgaggcagaagcacgccccggtgaatcgtggcaagcggccgctgatcgaatccgcaaagaatcccggcaaccgccggcagccggtgcgccgtcgattaggaagccgcccaagggcgacgagcaaccagattttttcgttccgatgctctatgacgtgggcacccgcgatagtcgcagcatcatggacgtggccgttttccgtctgtcgaagcgtgaccgacgagctggcgaggtgatccgctacgagcttccagacgggcacgtagaggtttccgcagggccggccggcatggccagtgtgtgggattacgacctggtactgatggcggtttcccatctaaccgaatccatgaaccgataccgggaagggaagggagacaagcccggccgcgtgttccgtccacacgttgcggacgtactcaagttctgccggcgagccgatggcggaaagcagaaagacgacctggtagaaacctgcattcggttaaacaccacgcacgttgccatgcagcgtacgaagaaggccaagaacggccgcctggtgacggtatccgagggtgaagccttgattagccgctacaagatcgtaaagagcgaaaccgggcggccggagtacatcgagatcgagctagctgattggatgtaccgcgagatcacagaaggcaagaacccggacgtgctgacggttcaccccgattactttttgatcgatcccggcatcggccgttttctctaccgcctggcacgccgcgccgcaggcaaggcagaagccagatggttgttcaagacgatctacgaacgcagtggcagcgccggagagttcaagaagttctgtttcaccgtgcgcaagctgatcgggtcaaatgacctgccggagtacgatttgaaggaggaggcggggcaggctggcccgatcctagtcatgcgctaccgcaacctgatcgagggcgaagcatccgccggttcctaatgtacggagcagatgctagggcaaattgccctagcaggggaaaaaggtcgaaaaggtctctttcctgtggatagcacgtacattgggaacccaaagccgtacattgggaaccggaacccgtacattgggaacccaaagccgtacattgggaaccggtcacacatgtaagtgactgatataaaagagaaaaaaggcgatttttccgcctaaaactctttaaaacttattaaaactcttaaaacccgcctggcctgtgcataactgtctggccagcgcacagccgaagagctgcaaaaagcgcctacccttcggtcgctgcgctccctacgccccgccgcttcgcgtcggcctatcgcggccgctggccgctcaaaaatggctggcctacggccaggcaatctaccagggcgcggacaagccgcgccgtcgccactcgaccgccggcgcccacatcaaggcaccctgcctcgcgcgtttcggtgatgacggtgaaaacctctgacacatgcagctcccggagacggtcacagcttgtctgtaagcggatgccgggagcagacaagcccgtcagggcgcgtcagcgggtgttggcgggtgtcggggcgcagccatgacccagtcacgtagcgatagcggagtgtatactggcttaactatgcggcatcagagcagattgtactgagagtgcaccatatgcggtgtgaaataccgcacagatgcgtaaggagaaaataccgcatcaggcgctcttccgcttcctcgctcactgactcgctgcgctcggtcgttcggctgcggcgagcggtatcagctcactcaaaggcggtaatacggttatccacagaatcaggggataacgcaggaaagaacatgtgagcaaaaggccagcaaaaggccaggaaccgtaaaaaggccgcgttgctggcgtttttccataggctccgcccccctgacgagcatcacaaaaatcgacgctcaagtcagaggtggcgaaacccgacaggactataaagataccaggcgtttccccctggaagctccctcgtgcgctctcctgttccgaccctgccgcttaccggatacctgtccgcctttctcccttcgggaagcgtggcgctttctcatagctcacgctgtaggtatctcagttcggtgtaggtcgttcgctccaagctgggctgtgtgcacgaaccccccgttcagcccgaccgctgcgccttatccggtaactatcgtcttgagtccaacccggtaagacacgacttatcgccactggcagcagccactggtaacaggattagcagagcgaggtatgtaggcggtgctacagagttcttgaagtggtggcctaactacggctacactagaaggacagtatttggtatctgcgctctgctgaagccagttaccttcggaaaaagagttggtagctcttgatccggcaaacaaaccaccgctggtagcggtggtttttttgtttgcaagcagcagattacgcgcagaaaaaaaggatctcaagaagatcctttgatcttttctacggggtctgacgctcagtggaacgaaaactcacgttaagggattttggtcatgcattctaggtactaaaacaattcatccagtaaaatataatattttattttctcccaatcaggcttgatccccagtaagtcaaaaaatagctcgacatactgttcttccccgatatcctccctgatcgaccggacgcagaaggcaatgtcataccacttgtccgccctgccgcttctcccaagatcaataaagccacttactttgccatctttcacaaagatgttgctgtctcccaggtcgccgtgggaaaagacaagttcctcttcgggcttttccgtctttaaaaaatcatacagctcgcgcggatctttaaatggagtgtcttcttcccagttttcgcaatccacatcggccagatcgttattcagtaagtaatccaattcggctaagcggctgtctaagctattcgtatagggacaatccgatatgtcgatggagtgaaagagcctgatgcactccgcatacagctcgataatcttttcagggctttgttcatcttcatactcttccgagcaaaggacgccatcggcctcactcatgagcagattgctccagccatcatgccgttcaaagtgcaggacctttggaacaggcagctttccttccagccatagcatcatgtccttttcccgttccacatcataggtggtccctttataccggctgtccgtcatttttaaatataggttttcattttctcccaccagcttatataccttagcaggagacattccttccgtatcttttacgcagcggtatttttcgatcagttttttcaattccggtgatattctcattttagccatttattatttccttcctcttttctacagtatttaaagataccccaagaagctaattataacaagacgaactccaattcactgttccttgcattctaaaaccttaaataccagaaaacagctttttcaaagttgttttcaaagttggcgtataacatagtatcgacggagccgattttgaaaccgcggtgatcacaggcagcaacgctctgtcatcgttacaatcaacatgctaccctccgcgagatcatccgtgtttcaaacccggcagcttagttgccgttcttccgaatagcatcggtaacatgagcaaagtctgccgccttacaacggctctcccgctgacgccgtcccggactgatgggctgcctgtatcgagtggtgattttgtgccgagctgccggtcggggagctgttggctggctggtggcaggatatattgtggtgtaaacaaattgacgcttagacaacttaataacacattgcggacgtttttaatgtactgaattaacgccgaattaattcctaggccaccatgttgggcccggcgcgccaagcttgcatgcctgcaggtcaacatggtggagcacgacactctcgtctactccaagaatatcaaagatacagtctcagaagaccagagggctattgagacttttcaacaaagggtaatatcgggaaacctcctcggattccattgcccagctatctgtcacttcatcgaaaggacagtagaaaaggaagatggcttctacaaatgccatcattgcgataaaggaaaggctatcgttcaagatgcctctaccgacagtggtcccaaagatggacccccacccacgaggaacatcgtggaaaaagaagacgttccaaccacgtcttcaaagcaagtggattgatgtgatggtcaacatggtggagcacgacactctcgtctactccaagaatatcaaagatacagtctcagaagaccagagggctattgagacttttcaacaaagggtaatatcgggaaacctcctcggattccattgcccagctatctgtcacttcatcgaaaggacagtagaaaaggaagatggcttctacaaatgccatcattgcgataaaggaaaggctatcgttcaagatgcctctaccgacagtggtcccaaagatggacccccacccacgaggaacatcgtggaaaaagaagacgttccaaccacgtcttcaaagcaagtggattgatgtgatatctccactgacgtaagggatgacgcacaatcccactatccttcgcaagacccttcctctatataaggaagttcatttcatttggagagg

SEQ ID NO: 573 - DNA, 9945 bp, Artificial sequence
  TRV2_ Nitab4.5_0005412g0010.2
ataaaacattgcacctatggtgttgccctggctggggtatgtcagtgatcgcagtagaatgtactaattgacaagttggagaatacggtagaacgtccttatccaacacagcctttatccctctccctgacgaggtttttgtcagtgtaatatttctttttgaactatccagcttagtaccgtacgggaaagtgactggtgtgcttatctttgaaatgttactttgggtttcggttctttaggttagtaagaaagcacttgtcttctcatacaaaggaaaacctgagacgtatcgcttacgaaagtagcaatgaaagaaaggtggtggttttaatcgctaccgcaaaaacgatggggtcgttttaattaacttctcctacgcaagcgtctaaacggacgttggggttttgctagtttctttagagaaaactagctaagtctttaatgttatcattagagatggcataaatataatacttgtgtctgctgataagatcattttaatttggacgattagacttgttgaactacaggttactgaatcacttgcgctaatcaacatgggagatatgtacgatgaatcatttgacaagtcgggcggtcctgctgacttgatggacgattcttgggtggaatcagtttcgtggaaagatctgttgaagaagttacacagcataaaatttgcactacagtctggtagagatgagatcactgggttactagcggcactgaatagacagtgtccttattcaccatatgagcagtttccagataagaaggtgtatttccttttagactcacgggctaacagtgctcttggtgtgattcagaacgcttcagcgttcaagagacgagctgatgagaagaatgcagtggcgggtgttacaaatattcctgcgaatccaaacacaacggttacgacgaaccaagggagtactactactaccaaggcgaacactggctcgactttggaagaagacttgtacacttattacaaattcgatgatgcctctacagctttccacaaatctctaacttcgttagagaacatggagttgaagagttattaccgaaggaactttgagaaagtattcgggattaagtttggtggagcagctgctagttcatctgcaccgcctccagcgagtggaggtccgatacgtcctaatccctagggatttaaggacgtgaactctgttgagatctctgtgaaattcagagggtgggtgataccatattcactgatgccattagcgacatctaaatagggctaattgtgactaatttgagggaatttcctttaccattgacgtcagtgtcgttggtagcatttgagtttcgcaatgcacgaattacttaggaagtggcttgacgacactaatgtgttattgttagataatggtttggtggtcaaggtacgtagtagagtcccacatattcgcacgtatgaagtaattggaaagttgtcagtttttgataattcactgggagatgatacgctgtttgagggaaaagtagagaacgtatttgtttttatgttcaggcggttcttgtgtgtcaacaaagatggacattgttactcaaggaagcacgatgagctttattattacggacgagtggacttagattctgtgagtaaggttaccgaattccctctataagatttttaatttaatgagtgtttctgattttggtcatcttctcggtctaagatttactaaattacgccaactggatgtgtatgcgtgtacaaatttaacatgtctttttataggtggtggggctttttctgtacctaaacacctggaagaaattgatatcatcttatgtccgaagcttgtagagttatttgagcaatgcgactctctcttcaactcagaatttgcaagagttcgaaagttaaggttgaaagagttaccgcaattagaaactctgggcaagccactgagtatggatccggtaccgagctcacgcgtctcgaggcccgggcatgtcccgaagacattaaactacggttctttaagtagatccgtgtctgaagttttaggttcaatttaaacctacgagattgacattctcgactgatcttgattgatcggtaagtcttttgtaatttaattttctttttgattttattttaaattgttatctgtttctgtgtatagactgtttgagatcggcgtttggccgactcattgtcttaccataggggaacggactttgtttgtgttgttattttatttgtattttattaaaattctcaacgatctgaaaaagcctcgcggctaagagattgttggggggtgagtaagtacttttaaagtgatgatggttacaaaggcaaaaggggtaaaacccctcgcctacgtaagcgttattacgcccgtctgtacttatatcagtacactgacgagtccctaaaggacgaaacgggagaacgctagccaccaccaccaccaccacgtgtgaattacaggtgaccagctcgaatttccccgatcgttcaaacatttggcaataaagtttcttaagattgaatcctgttgccggtcttgcgatgattatcatataatttctgttgaattacgttaagcatgtaataattaacatgtaatgcatgacgttatttatgagatgggtttttatgattagagtcccgcaattatacatttaatacgcgatagaaaacaaaatatagcgcgcaaactaggataaattatcgcgcgcggtgtcatctatgttactagatcgggaattaaactatcagtgtttgacaggatatattggcgggtaaacctaagagaaaagagcgtttattagaataacggatatttaaaagggcgtgaaaaggtttatccgttcgtccatttgtatgtgcatgccaaccacagggttcccctcgggatcaaagtactttgatccaacccctccgctgctatagtgcagtcggcttctgacgttcagtgcagccgtcttctgaaaacgacatgtcgcacaagtcctaagttacgcgacaggctgccgccctgcccttttcctggcgttttcttgtcgcgtgttttagtcgcataaagtagaatacttgcgactagaaccggagacattacgccatgaacaagagcgccgccgctggcctgctgggctatgcccgcgtcagcaccgacgaccaggacttgaccaaccaacgggccgaactgcacgcggccggctgcaccaagctgttttccgagaagatcaccggcaccaggcgcgaccgcccggagctggccaggatgcttgaccacctacgccctggcgacgttgtgacagtgaccaggctagaccgcctggcccgcagcacccgcgacctactggacattgccgagcgcatccaggaggccggcgcgggcctgcgtagcctggcagagccgtgggccgacaccaccacgccggccggccgcatggtgttgaccgtgttcgccggcattgccgagttcgagcgttccctaatcatcgaccgcacccggagcgggcgcgaggccgccaaggcccgaggcgtgaagtttggcccccgccctaccctcaccccggcacagatcgcgcacgcccgcgagctgatcgaccaggaaggccgcaccgtgaaagaggcggctgcactgcttggcgtgcatcgctcgaccctgtaccgcgcacttgagcgcagcgaggaagtgacgcccaccgaggccaggcggcgcggtgccttccgtgaggacgcattgaccgaggccgacgccctggcggccgccgagaatgaacgccaagaggaacaagcatgaaaccgcaccaggacggccaggacgaaccgtttttcattaccgaagagatcgaggcggagatgatcgcggccgggtacgtgttcgagccgcccgcgcacgtctcaaccgtgcggctgcatgaaatcctggccggtttgtctgatgccaagctggcggcctggccggccagcttggccgctgaagaaaccgagcgccgccgtctaaaaaggtgatgtgtatttgagtaaaacagcttgcgtcatgcggtcgctgcgtatatgatgcgatgagtaaataaacaaatacgcaaggggaacgcatgaaggttatcgctgtacttaaccagaaaggcgggtcaggcaagacgaccatcgcaacccatctagcccgcgccctgcaactcgccggggccgatgttctgttagtcgattccgatccccagggcagtgcccgcgattgggcggccgtgcgggaagatcaaccgctaaccgttgtcggcatcgaccgcccgacgattgaccgcgacgtgaaggccatcggccggcgcgacttcgtagtgatcgacggagcgccccaggcggcggacttggctgtgtccgcgatcaaggcagccgacttcgtgctgattccggtgcagccaagcccttacgacatatgggccaccgccgacctggtggagctggttaagcagcgcattgaggtcacggatggaaggctacaagcggcctttgtcgtgtcgcgggcgatcaaaggcacgcgcatcggcggtgaggttgccgaggcgctggccgggtacgagctgcccattcttgagtcccgtatcacgcagcgcgtgagctacccaggcactgccgccgccggcacaaccgttcttgaatcagaacccgagggcgacgctgcccgcgaggtccaggcgctggccgctgaaattaaatcaaaactcatttgagttaatgaggtaaagagaaaatgagcaaaagcacaaacacgctaagtgccggccgtccgagcgcacgcagcagcaaggctgcaacgttggccagcctggcagacacgccagccatgaagcgggtcaactttcagttgccggcggaggatcacaccaagctgaagatgtacgcggtacgccaaggcaagaccattaccgagctgctatctgaatacatcgcgcagctaccagagtaaatgagcaaatgaataaatgagtagatgaattttagcggctaaaggaggcggcatggaaaatcaagaacaaccaggcaccgacgccgtggaatgccccatgtgtggaggaacgggcggttggccaggcgtaagcggctgggttgtctgccggccctgcaatggcactggaacccccaagcccgaggaatcggcgtgacggtcgcaaaccatccggcccggtacaaatcggcgcggcgctgggtgatgacctggtggagaagttgaaggccgcgcaggccgcccagcggcaacgcatcgaggcagaagcacgccccggtgaatcgtggcaagcggccgctgatcgaatccgcaaagaatcccggcaaccgccggcagccggtgcgccgtcgattaggaagccgcccaagggcgacgagcaaccagattttttcgttccgatgctctatgacgtgggcacccgcgatagtcgcagcatcatggacgtggccgttttccgtctgtcgaagcgtgaccgacgagctggcgaggtgatccgctacgagcttccagacgggcacgtagaggtttccgcagggccggccggcatggccagtgtgtgggattacgacctggtactgatggcggtttcccatctaaccgaatccatgaaccgataccgggaagggaagggagacaagcccggccgcgtgttccgtccacacgttgcggacgtactcaagttctgccggcgagccgatggcggaaagcagaaagacgacctggtagaaacctgcattcggttaaacaccacgcacgttgccatgcagcgtacgaagaaggccaagaacggccgcctggtgacggtatccgagggtgaagccttgattagccgctacaagatcgtaaagagcgaaaccgggcggccggagtacatcgagatcgagctagctgattggatgtaccgcgagatcacagaaggcaagaacccggacgtgctgacggttcaccccgattactttttgatcgatcccggcatcggccgttttctctaccgcctggcacgccgcgccgcaggcaaggcagaagccagatggttgttcaagacgatctacgaacgcagtggcagcgccggagagttcaagaagttctgtttcaccgtgcgcaagctgatcgggtcaaatgacctgccggagtacgatttgaaggaggaggcggggcaggctggcccgatcctagtcatgcgctaccgcaacctgatcgagggcgaagcatccgccggttcctaatgtacggagcagatgctagggcaaattgccctagcaggggaaaaaggtcgaaaaggtctctttcctgtggatagcacgtacattgggaacccaaagccgtacattgggaaccggaacccgtacattgggaacccaaagccgtacattgggaaccggtcacacatgtaagtgactgatataaaagagaaaaaaggcgatttttccgcctaaaactctttaaaacttattaaaactcttaaaacccgcctggcctgtgcataactgtctggccagcgcacagccgaagagctgcaaaaagcgcctacccttcggtcgctgcgctccctacgccccgccgcttcgcgtcggcctatcgcggccgctggccgctcaaaaatggctggcctacggccaggcaatctaccagggcgcggacaagccgcgccgtcgccactcgaccgccggcgcccacatcaaggcaccctgcctcgcgcgtttcggtgatgacggtgaaaacctctgacacatgcagctcccggagacggtcacagcttgtctgtaagcggatgccgggagcagacaagcccgtcagggcgcgtcagcgggtgttggcgggtgtcggggcgcagccatgacccagtcacgtagcgatagcggagtgtatactggcttaactatgcggcatcagagcagattgtactgagagtgcaccatatgcggtgtgaaataccgcacagatgcgtaaggagaaaataccgcatcaggcgctcttccgcttcctcgctcactgactcgctgcgctcggtcgttcggctgcggcgagcggtatcagctcactcaaaggcggtaatacggttatccacagaatcaggggataacgcaggaaagaacatgtgagcaaaaggccagcaaaaggccaggaaccgtaaaaaggccgcgttgctggcgtttttccataggctccgcccccctgacgagcatcacaaaaatcgacgctcaagtcagaggtggcgaaacccgacaggactataaagataccaggcgtttccccctggaagctccctcgtgcgctctcctgttccgaccctgccgcttaccggatacctgtccgcctttctcccttcgggaagcgtggcgctttctcatagctcacgctgtaggtatctcagttcggtgtaggtcgttcgctccaagctgggctgtgtgcacgaaccccccgttcagcccgaccgctgcgccttatccggtaactatcgtcttgagtccaacccggtaagacacgacttatcgccactggcagcagccactggtaacaggattagcagagcgaggtatgtaggcggtgctacagagttcttgaagtggtggcctaactacggctacactagaaggacagtatttggtatctgcgctctgctgaagccagttaccttcggaaaaagagttggtagctcttgatccggcaaacaaaccaccgctggtagcggtggtttttttgtttgcaagcagcagattacgcgcagaaaaaaaggatctcaagaagatcctttgatcttttctacggggtctgacgctcagtggaacgaaaactcacgttaagggattttggtcatgcattctaggtactaaaacaattcatccagtaaaatataatattttattttctcccaatcaggcttgatccccagtaagtcaaaaaatagctcgacatactgttcttccccgatatcctccctgatcgaccggacgcagaaggcaatgtcataccacttgtccgccctgccgcttctcccaagatcaataaagccacttactttgccatctttcacaaagatgttgctgtctcccaggtcgccgtgggaaaagacaagttcctcttcgggcttttccgtctttaaaaaatcatacagctcgcgcggatctttaaatggagtgtcttcttcccagttttcgcaatccacatcggccagatcgttattcagtaagtaatccaattcggctaagcggctgtctaagctattcgtatagggacaatccgatatgtcgatggagtgaaagagcctgatgcactccgcatacagctcgataatcttttcagggctttgttcatcttcatactcttccgagcaaaggacgccatcggcctcactcatgagcagattgctccagccatcatgccgttcaaagtgcaggacctttggaacaggcagctttccttccagccatagcatcatgtccttttcccgttccacatcataggtggtccctttataccggctgtccgtcatttttaaatataggttttcattttctcccaccagcttatataccttagcaggagacattccttccgtatcttttacgcagcggtatttttcgatcagttttttcaattccggtgatattctcattttagccatttattatttccttcctcttttctacagtatttaaagataccccaagaagctaattataacaagacgaactccaattcactgttccttgcattctaaaaccttaaataccagaaaacagctttttcaaagttgttttcaaagttggcgtataacatagtatcgacggagccgattttgaaaccgcggtgatcacaggcagcaacgctctgtcatcgttacaatcaacatgctaccctccgcgagatcatccgtgtttcaaacccggcagcttagttgccgttcttccgaatagcatcggtaacatgagcaaagtctgccgccttacaacggctctcccgctgacgccgtcccggactgatgggctgcctgtatcgagtggtgattttgtgccgagctgccggtcggggagctgttggctggctggtggcaggatatattgtggtgtaaacaaattgacgcttagacaacttaataacacattgcggacgtttttaatgtactgaattaacgccgaattaattcctaggccaccatgttgggcccggcgcgccaagcttgcatgcctgcaggtcaacatggtggagcacgacactctcgtctactccaagaatatcaaagatacagtctcagaagaccagagggctattgagacttttcaacaaagggtaatatcgggaaacctcctcggattccattgcccagctatctgtcacttcatcgaaaggacagtagaaaaggaagatggcttctacaaatgccatcattgcgataaaggaaaggctatcgttcaagatgcctctaccgacagtggtcccaaagatggacccccacccacgaggaacatcgtggaaaaagaagacgttccaaccacgtcttcaaagcaagtggattgatgtgatggtcaacatggtggagcacgacactctcgtctactccaagaatatcaaagatacagtctcagaagaccagagggctattgagacttttcaacaaagggtaatatcgggaaacctcctcggattccattgcccagctatctgtcacttcatcgaaaggacagtagaaaaggaagatggcttctacaaatgccatcattgcgataaaggaaaggctatcgttcaagatgcctctaccgacagtggtcccaaagatggacccccacccacgaggaacatcgtggaaaaagaagacgttccaaccacgtcttcaaagcaagtggattgatgtgatatctccactgacgtaagggatgacgcacaatcccactatccttcgcaagacccttcctctatataaggaagttcatttcatttggagagg

SEQ ID NO: 574 - DNA, 9945 bp, Artificial sequence
  TRV2_ Nitab4.5_0005412g0020.2
ataaaacattgcacctatggtgttgccctggctggggtatgtcagtgatcgcagtagaatgtactaattgacaagttggagaatacggtagaacgtccttatccaacacagcctttatccctctccctgacgaggtttttgtcagtgtaatatttctttttgaactatccagcttagtaccgtacgggaaagtgactggtgtgcttatctttgaaatgttactttgggtttcggttctttaggttagtaagaaagcacttgtcttctcatacaaaggaaaacctgagacgtatcgcttacgaaagtagcaatgaaagaaaggtggtggttttaatcgctaccgcaaaaacgatggggtcgttttaattaacttctcctacgcaagcgtctaaacggacgttggggttttgctagtttctttagagaaaactagctaagtctttaatgttatcattagagatggcataaatataatacttgtgtctgctgataagatcattttaatttggacgattagacttgttgaactacaggttactgaatcacttgcgctaatcaacatgggagatatgtacgatgaatcatttgacaagtcgggcggtcctgctgacttgatggacgattcttgggtggaatcagtttcgtggaaagatctgttgaagaagttacacagcataaaatttgcactacagtctggtagagatgagatcactgggttactagcggcactgaatagacagtgtccttattcaccatatgagcagtttccagataagaaggtgtatttccttttagactcacgggctaacagtgctcttggtgtgattcagaacgcttcagcgttcaagagacgagctgatgagaagaatgcagtggcgggtgttacaaatattcctgcgaatccaaacacaacggttacgacgaaccaagggagtactactactaccaaggcgaacactggctcgactttggaagaagacttgtacacttattacaaattcgatgatgcctctacagctttccacaaatctctaacttcgttagagaacatggagttgaagagttattaccgaaggaactttgagaaagtattcgggattaagtttggtggagcagctgctagttcatctgcaccgcctccagcgagtggaggtccgatacgtcctaatccctagggatttaaggacgtgaactctgttgagatctctgtgaaattcagagggtgggtgataccatattcactgatgccattagcgacatctaaatagggctaattgtgactaatttgagggaatttcctttaccattgacgtcagtgtcgttggtagcatttgagtttcgcaatgcacgaattacttaggaagtggcttgacgacactaatgtgttattgttagataatggtttggtggtcaaggtacgtagtagagtcccacatattcgcacgtatgaagtaattggaaagttgtcagtttttgataattcactgggagatgatacgctgtttgagggaaaagtagagaacgtatttgtttttatgttcaggcggttcttgtgtgtcaacaaagatggacattgttactcaaggaagcacgatgagctttattattacggacgagtggacttagattctgtgagtaaggttaccgaattcatggaaataatttttaatgctgtaggtggttttgttgttgaggcggggaagttggtgtgtaaatgcatctatcctaatattgaaaataccgtctgtttcacatcaaatgttcaaagtgtaagagaggaaatggagaagctaacaaagtttagagatgatatcaaagggagggtggaaggagctgagggagaaggctataaaacaaaaccagaggttctccagtgggtcgaagatgttcaaaagctggagactgactgggaatctatgcaagaaaacattgcagcggctaagatggttgcaggatccggtaccgagctcacgcgtctcgaggcccgggcatgtcccgaagacattaaactacggttctttaagtagatccgtgtctgaagttttaggttcaatttaaacctacgagattgacattctcgactgatcttgattgatcggtaagtcttttgtaatttaattttctttttgattttattttaaattgttatctgtttctgtgtatagactgtttgagatcggcgtttggccgactcattgtcttaccataggggaacggactttgtttgtgttgttattttatttgtattttattaaaattctcaacgatctgaaaaagcctcgcggctaagagattgttggggggtgagtaagtacttttaaagtgatgatggttacaaaggcaaaaggggtaaaacccctcgcctacgtaagcgttattacgcccgtctgtacttatatcagtacactgacgagtccctaaaggacgaaacgggagaacgctagccaccaccaccaccaccacgtgtgaattacaggtgaccagctcgaatttccccgatcgttcaaacatttggcaataaagtttcttaagattgaatcctgttgccggtcttgcgatgattatcatataatttctgttgaattacgttaagcatgtaataattaacatgtaatgcatgacgttatttatgagatgggtttttatgattagagtcccgcaattatacatttaatacgcgatagaaaacaaaatatagcgcgcaaactaggataaattatcgcgcgcggtgtcatctatgttactagatcgggaattaaactatcagtgtttgacaggatatattggcgggtaaacctaagagaaaagagcgtttattagaataacggatatttaaaagggcgtgaaaaggtttatccgttcgtccatttgtatgtgcatgccaaccacagggttcccctcgggatcaaagtactttgatccaacccctccgctgctatagtgcagtcggcttctgacgttcagtgcagccgtcttctgaaaacgacatgtcgcacaagtcctaagttacgcgacaggctgccgccctgcccttttcctggcgttttcttgtcgcgtgttttagtcgcataaagtagaatacttgcgactagaaccggagacattacgccatgaacaagagcgccgccgctggcctgctgggctatgcccgcgtcagcaccgacgaccaggacttgaccaaccaacgggccgaactgcacgcggccggctgcaccaagctgttttccgagaagatcaccggcaccaggcgcgaccgcccggagctggccaggatgcttgaccacctacgccctggcgacgttgtgacagtgaccaggctagaccgcctggcccgcagcacccgcgacctactggacattgccgagcgcatccaggaggccggcgcgggcctgcgtagcctggcagagccgtgggccgacaccaccacgccggccggccgcatggtgttgaccgtgttcgccggcattgccgagttcgagcgttccctaatcatcgaccgcacccggagcgggcgcgaggccgccaaggcccgaggcgtgaagtttggcccccgccctaccctcaccccggcacagatcgcgcacgcccgcgagctgatcgaccaggaaggccgcaccgtgaaagaggcggctgcactgcttggcgtgcatcgctcgaccctgtaccgcgcacttgagcgcagcgaggaagtgacgcccaccgaggccaggcggcgcggtgccttccgtgaggacgcattgaccgaggccgacgccctggcggccgccgagaatgaacgccaagaggaacaagcatgaaaccgcaccaggacggccaggacgaaccgtttttcattaccgaagagatcgaggcggagatgatcgcggccgggtacgtgttcgagccgcccgcgcacgtctcaaccgtgcggctgcatgaaatcctggccggtttgtctgatgccaagctggcggcctggccggccagcttggccgctgaagaaaccgagcgccgccgtctaaaaaggtgatgtgtatttgagtaaaacagcttgcgtcatgcggtcgctgcgtatatgatgcgatgagtaaataaacaaatacgcaaggggaacgcatgaaggttatcgctgtacttaaccagaaaggcgggtcaggcaagacgaccatcgcaacccatctagcccgcgccctgcaactcgccggggccgatgttctgttagtcgattccgatccccagggcagtgcccgcgattgggcggccgtgcgggaagatcaaccgctaaccgttgtcggcatcgaccgcccgacgattgaccgcgacgtgaaggccatcggccggcgcgacttcgtagtgatcgacggagcgccccaggcggcggacttggctgtgtccgcgatcaaggcagccgacttcgtgctgattccggtgcagccaagcccttacgacatatgggccaccgccgacctggtggagctggttaagcagcgcattgaggtcacggatggaaggctacaagcggcctttgtcgtgtcgcgggcgatcaaaggcacgcgcatcggcggtgaggttgccgaggcgctggccgggtacgagctgcccattcttgagtcccgtatcacgcagcgcgtgagctacccaggcactgccgccgccggcacaaccgttcttgaatcagaacccgagggcgacgctgcccgcgaggtccaggcgctggccgctgaaattaaatcaaaactcatttgagttaatgaggtaaagagaaaatgagcaaaagcacaaacacgctaagtgccggccgtccgagcgcacgcagcagcaaggctgcaacgttggccagcctggcagacacgccagccatgaagcgggtcaactttcagttgccggcggaggatcacaccaagctgaagatgtacgcggtacgccaaggcaagaccattaccgagctgctatctgaatacatcgcgcagctaccagagtaaatgagcaaatgaataaatgagtagatgaattttagcggctaaaggaggcggcatggaaaatcaagaacaaccaggcaccgacgccgtggaatgccccatgtgtggaggaacgggcggttggccaggcgtaagcggctgggttgtctgccggccctgcaatggcactggaacccccaagcccgaggaatcggcgtgacggtcgcaaaccatccggcccggtacaaatcggcgcggcgctgggtgatgacctggtggagaagttgaaggccgcgcaggccgcccagcggcaacgcatcgaggcagaagcacgccccggtgaatcgtggcaagcggccgctgatcgaatccgcaaagaatcccggcaaccgccggcagccggtgcgccgtcgattaggaagccgcccaagggcgacgagcaaccagattttttcgttccgatgctctatgacgtgggcacccgcgatagtcgcagcatcatggacgtggccgttttccgtctgtcgaagcgtgaccgacgagctggcgaggtgatccgctacgagcttccagacgggcacgtagaggtttccgcagggccggccggcatggccagtgtgtgggattacgacctggtactgatggcggtttcccatctaaccgaatccatgaaccgataccgggaagggaagggagacaagcccggccgcgtgttccgtccacacgttgcggacgtactcaagttctgccggcgagccgatggcggaaagcagaaagacgacctggtagaaacctgcattcggttaaacaccacgcacgttgccatgcagcgtacgaagaaggccaagaacggccgcctggtgacggtatccgagggtgaagccttgattagccgctacaagatcgtaaagagcgaaaccgggcggccggagtacatcgagatcgagctagctgattggatgtaccgcgagatcacagaaggcaagaacccggacgtgctgacggttcaccccgattactttttgatcgatcccggcatcggccgttttctctaccgcctggcacgccgcgccgcaggcaaggcagaagccagatggttgttcaagacgatctacgaacgcagtggcagcgccggagagttcaagaagttctgtttcaccgtgcgcaagctgatcgggtcaaatgacctgccggagtacgatttgaaggaggaggcggggcaggctggcccgatcctagtcatgcgctaccgcaacctgatcgagggcgaagcatccgccggttcctaatgtacggagcagatgctagggcaaattgccctagcaggggaaaaaggtcgaaaaggtctctttcctgtggatagcacgtacattgggaacccaaagccgtacattgggaaccggaacccgtacattgggaacccaaagccgtacattgggaaccggtcacacatgtaagtgactgatataaaagagaaaaaaggcgatttttccgcctaaaactctttaaaacttattaaaactcttaaaacccgcctggcctgtgcataactgtctggccagcgcacagccgaagagctgcaaaaagcgcctacccttcggtcgctgcgctccctacgccccgccgcttcgcgtcggcctatcgcggccgctggccgctcaaaaatggctggcctacggccaggcaatctaccagggcgcggacaagccgcgccgtcgccactcgaccgccggcgcccacatcaaggcaccctgcctcgcgcgtttcggtgatgacggtgaaaacctctgacacatgcagctcccggagacggtcacagcttgtctgtaagcggatgccgggagcagacaagcccgtcagggcgcgtcagcgggtgttggcgggtgtcggggcgcagccatgacccagtcacgtagcgatagcggagtgtatactggcttaactatgcggcatcagagcagattgtactgagagtgcaccatatgcggtgtgaaataccgcacagatgcgtaaggagaaaataccgcatcaggcgctcttccgcttcctcgctcactgactcgctgcgctcggtcgttcggctgcggcgagcggtatcagctcactcaaaggcggtaatacggttatccacagaatcaggggataacgcaggaaagaacatgtgagcaaaaggccagcaaaaggccaggaaccgtaaaaaggccgcgttgctggcgtttttccataggctccgcccccctgacgagcatcacaaaaatcgacgctcaagtcagaggtggcgaaacccgacaggactataaagataccaggcgtttccccctggaagctccctcgtgcgctctcctgttccgaccctgccgcttaccggatacctgtccgcctttctcccttcgggaagcgtggcgctttctcatagctcacgctgtaggtatctcagttcggtgtaggtcgttcgctccaagctgggctgtgtgcacgaaccccccgttcagcccgaccgctgcgccttatccggtaactatcgtcttgagtccaacccggtaagacacgacttatcgccactggcagcagccactggtaacaggattagcagagcgaggtatgtaggcggtgctacagagttcttgaagtggtggcctaactacggctacactagaaggacagtatttggtatctgcgctctgctgaagccagttaccttcggaaaaagagttggtagctcttgatccggcaaacaaaccaccgctggtagcggtggtttttttgtttgcaagcagcagattacgcgcagaaaaaaaggatctcaagaagatcctttgatcttttctacggggtctgacgctcagtggaacgaaaactcacgttaagggattttggtcatgcattctaggtactaaaacaattcatccagtaaaatataatattttattttctcccaatcaggcttgatccccagtaagtcaaaaaatagctcgacatactgttcttccccgatatcctccctgatcgaccggacgcagaaggcaatgtcataccacttgtccgccctgccgcttctcccaagatcaataaagccacttactttgccatctttcacaaagatgttgctgtctcccaggtcgccgtgggaaaagacaagttcctcttcgggcttttccgtctttaaaaaatcatacagctcgcgcggatctttaaatggagtgtcttcttcccagttttcgcaatccacatcggccagatcgttattcagtaagtaatccaattcggctaagcggctgtctaagctattcgtatagggacaatccgatatgtcgatggagtgaaagagcctgatgcactccgcatacagctcgataatcttttcagggctttgttcatcttcatactcttccgagcaaaggacgccatcggcctcactcatgagcagattgctccagccatcatgccgttcaaagtgcaggacctttggaacaggcagctttccttccagccatagcatcatgtccttttcccgttccacatcataggtggtccctttataccggctgtccgtcatttttaaatataggttttcattttctcccaccagcttatataccttagcaggagacattccttccgtatcttttacgcagcggtatttttcgatcagttttttcaattccggtgatattctcattttagccatttattatttccttcctcttttctacagtatttaaagataccccaagaagctaattataacaagacgaactccaattcactgttccttgcattctaaaaccttaaataccagaaaacagctttttcaaagttgttttcaaagttggcgtataacatagtatcgacggagccgattttgaaaccgcggtgatcacaggcagcaacgctctgtcatcgttacaatcaacatgctaccctccgcgagatcatccgtgtttcaaacccggcagcttagttgccgttcttccgaatagcatcggtaacatgagcaaagtctgccgccttacaacggctctcccgctgacgccgtcccggactgatgggctgcctgtatcgagtggtgattttgtgccgagctgccggtcggggagctgttggctggctggtggcaggatatattgtggtgtaaacaaattgacgcttagacaacttaataacacattgcggacgtttttaatgtactgaattaacgccgaattaattcctaggccaccatgttgggcccggcgcgccaagcttgcatgcctgcaggtcaacatggtggagcacgacactctcgtctactccaagaatatcaaagatacagtctcagaagaccagagggctattgagacttttcaacaaagggtaatatcgggaaacctcctcggattccattgcccagctatctgtcacttcatcgaaaggacagtagaaaaggaagatggcttctacaaatgccatcattgcgataaaggaaaggctatcgttcaagatgcctctaccgacagtggtcccaaagatggacccccacccacgaggaacatcgtggaaaaagaagacgttccaaccacgtcttcaaagcaagtggattgatgtgatggtcaacatggtggagcacgacactctcgtctactccaagaatatcaaagatacagtctcagaagaccagagggctattgagacttttcaacaaagggtaatatcgggaaacctcctcggattccattgcccagctatctgtcacttcatcgaaaggacagtagaaaaggaagatggcttctacaaatgccatcattgcgataaaggaaaggctatcgttcaagatgcctctaccgacagtggtcccaaagatggacccccacccacgaggaacatcgtggaaaaagaagacgttccaaccacgtcttcaaagcaagtggattgatgtgatatctccactgacgtaagggatgacgcacaatcccactatccttcgcaagacccttcctctatataaggaagttcatttcatttggagagg

1. A method of modulating (e.g. decreasing) the alkaloid content (e.g. nicotine content) of a tobacco plant or a part thereof, or tobacco plant cell, the method comprising modifying said plant or cell by modulating the activity or expression of:
a) at least one Nic3 gene;
and optionally
b) at least one Nic1 ERF gene; and/or
c) at least one Nic2 ERF gene.

2. A method of modulating (e.g. decreasing) the alkaloid content (e.g. nicotine content) of a tobacco plant or a part thereof, or tobacco plant cell, the method comprising modifying said plant or part thereof, or cell by: introducing at least one mutation to a Nic3 locus (e.g. in a Nic3 gene), and optionally at least one mutation to a Nic1 locus (e.g. in a Nic1 ERF gene) and/or at least one mutation to a Nic2 locus (e.g. in a Nic2 ERF gene).

3. A method of modulating (e.g. decreasing) the content of a tobacco specific nitrosamine (TSNA) precursor in a tobacco plant or plant part thereof, or tobacco plant cell, the method comprising modifying said plant or cell by:
i) modulating the activity or expression of:
a) at least one Nic3 gene; and optionally
b) at least one Nic1 ERF gene; and/or
c) at least one Nic2 ERF gene; or
ii) introducing at least one mutation to a Nic3 locus (e.g. in a Nic3 gene), and optionally at least one mutation to a Nic1 locus (e.g. in a Nic1 ERF gene) and/or at least one mutation to a Nic2 locus (e.g. in a Nic2 ERF gene).

4. Use of:
a) at least one Nic3 gene, and optionally at least one Nic1 ERF gene and/or at least one Nic2 ERF gene; or
b) at least one mutation in a Nic3 locus (e.g. in a Nic3 gene), and optionally at least one mutation in a Nic1 locus (e.g. in a Nic1 ERF gene) and/or at least one mutation in a Nic2 locus (e.g. in a Nic2 ERF gene);
for modulating (e.g. decreasing) alkaloid content (e.g. nicotine content) and or TSNA precursor content of a tobacco plant or part thereof or tobacco plant cell.

5. A method for producing a plant or part thereof, a tobacco plant cell, a tobacco plant propagation material, a tobacco leaf, a cut harvested tobacco leaf, a processed tobacco leaf or a cut and processed tobacco leaf which has modulated (e.g. decreased) alkaloid content (e.g. nicotine content), the method comprising modifying said tobacco plant or part thereof or tobacco cell to:
i) modulate the activity or expression of:
a) at least one Nic3 gene; and optionally
b) at least one Nic1 ERF gene; and/or
c) at least one Nic2 ERF gene; or
ii) introduce at least one mutation in a Nic3 locus (e.g. in a Nic3 gene), and optionally at least one mutation in a Nic1 locus (e.g. in a Nic1 ERF gene) and/or at least one mutation in a Nic2 locus (e.g. in a Nic2 ERF gene).

6. A method or use according to any one of the preceding claims, wherein the nicotine content is decreased in comparison to a tobacco plant or part thereof or tobacco cell which has not been modified to introduce at least one mutation to a Nic3 locus, and optionally at least one mutation to a Nic1 locus and/or at least one mutation to a Nic2 locus.

7. A tobacco plant or part thereof or tobacco cell which has been modified to achieve a reduction in alkaloid content (e.g. nicotine content) in comparison to an unmodified tobacco plant or part thereof or tobacco cell, wherein said modification comprises:
i) modulated activity of or expression of:
a) at least one Nic3 gene; and optionally
b) at least one Nic1 ERF gene; and/or
c) at least one Nic2 ERF gene; or
ii) at least one mutation in a Nic3 locus (e.g. in a Nic3 gene), and optionally at least one mutation in a Nic1 locus (e.g. in a Nic1 ERF gene) and/or at least one mutation in a Nic2 locus (e.g. in a Nic2 ERF gene).

8. A tobacco plant propagation material obtainable from a tobacco plant or part thereof or tobacco cell according to claim 7 or from a tobacco plant or part thereof or tobacco cell produced by the method of any one of claim 5 or 6.

9. A method or use according to any one of claims 1-6, a plant or part thereof or cell according to claim 7, or a plant propagation material according to claim 8 wherein:
a) the activity or expression of a Nic3 gene selected from SEQ ID No. 73, 118, 124 or 127 or a sequence which has at least 90% identity thereto or a functional variant or functional fragment or orthologue of said gene is modulated; or said at least one mutation in the Nic3 locus is in a Nic3 gene selected from SEQ ID No. 73, 118, 124 or 127 or a sequence which has at least 90% identity thereto or a functional variant or functional fragment or orthologue of said gene:
b) the activity or expression of a Nic1 ERF gene selected from those listed in Table 1 is modulated; or said at least one mutation in the Nic1 locus is in a Nic1 ERF gene selected from:
SEQ ID No. 8; or SEQ ID No. 12; or SEQ ID No. 16; or SEQ ID No. 20; or SEQ ID No. 24; or SEQ ID No. 28; or SEQ ID No. 32; or a sequence which has at least 90% identity thereto, or a functional variant or functional fragment or orthologue of said gene; and/or
c) the activity or expression of a Nic2 ERF gene selected from those listed in Table 2 is modulated; or said at least one mutation in the Nic2 locus is in a Nic2 ERF gene selected from: SEQ ID No. 69; SEQ ID No. 37; or SEQ ID No. 41; or SEQ ID No. 45; or SEQ ID No. 49; or SEQ ID No. 53; or SEQ ID No. 57; or SEQ ID No. 61; or SEQ ID No. 65; or a sequence which has at least 90% identity thereto or a functional variant or functional fragment or orthologue of said gene.

10. A method or use according to any one of claim 1-6 or 9, a plant or part thereof according to claim 7 or 9, or a plant propagation material according to claim 8 or 9 wherein:
i) the activity or expression of SEQ ID No. 8 is modulated; or said at least one mutation in the Nic1 locus is in SEQ ID No. 8; and/or
ii) the activity or expression of SEQ ID No. 69 is modulated; or said at least one mutation in the Nic2 locus is in SEQ ID No. 69.

11. A method or use according to any one of claim 1-6 or 9 or 10, a plant or part thereof according to claim 7 or 9, or a plant propagation material according to claims 8 to 10 wherein said at least one mutation in the Nic3 locus is in a Nic3 gene selected from SEQ ID No. 73, 118, 124 or 127 or a sequence which has at least 90% identity thereto or a functional variant or functional fragment or orthologue of said gene and said at least one mutation in the Nic3 gene is selected from:
i) a mutation in the Nic3 gene SEQ ID No. 73 or a sequence which has at least 90% identity thereto or a functional variant or functional fragment or orthologue of said gene that results in a mutation in amino acid residues 74 to 258 or 483-538 of SEQ ID No. 75 or a sequence which has at least 90% identity thereto, or a functional variant or functional fragment or orthologue of said polypeptide;
ii) a mutation in the Nic3 gene SEQ ID No. 118 or a sequence which has at least 90% identity thereto or a functional variant or functional fragment or orthologue of said gene that results in a mutation in amino acid residues 120-584 of SEQ ID No. 120 or a sequence which has at least 90% identity thereto, or a functional variant or functional fragment or orthologue of said polypeptide;
iii) a mutation in the Nic3 gene SEQ ID No. 124 or a sequence which has at least 90% identity thereto or a functional variant or functional fragment or orthologue of said gene that results in a mutation in amino acid residues 166-406 or 483-970 of SEQ ID No. 126 or a sequence which has at least 90% identity thereto, or a functional variant or functional fragment or orthologue of said polypeptide; and
iv) a mutation in the Nic3 gene SEQ ID No. 127 or a sequence which has at least 90% identity thereto or a functional variant or functional fragment or orthologue of said gene that results in a mutation in amino acid residues 171-406 or 509-967 of SEQ ID No. 129 or a sequence which has at least 90% identity thereto, or a functional variant or functional fragment or orthologue of said polypeptide.

12. Use of a plant or part thereof according to any one of claim 7 or 9-11, or of a plant produced by the method of any one of claim 5 or 6, or 9 to 11 to breed a plant.

13. Use of a plant or part thereof according to any one of claim 7 or 9-11, or of a plant produced by the method of any one of claim 5 or 6, or 9 to 11 for production of a product.

14. Use of a plant or part thereof according to any one of claim 7 or 9-11, or of a plant produced by the method of any one of claim 5 or 6, or 9 to 11 to grow a crop.

15. Use of a plant or part thereof according to any one of claim 7 or 9-11, or of a plant produced by the method of any one of claim 5 or 6, or 9 to 11 to produce a leaf.

16. A harvested leaf of a plant according to any one of claim 7 or 9-11, or obtainable from a plant propagated from a propagation material according to any one of claims 7-11, or obtainable from a plant obtained by a use according to any one of claim 4, 6 or 9-15, or obtainable from a plant produced by the method of any one of claim 5 or 6, or 9 to 15.

17. A harvested leaf of a plant according to claim 16, wherein the harvested leaf of a plant is a cut harvested leaf.

18. A processed leaf, preferably a processed tobacco leaf, preferably a non-viable processed tobacco leaf:
obtainable (e.g. obtained) from a plant obtainable from a use according to any one of claim 4, 6 or 9-15;
obtainable (e.g. obtained) by processing a plant according to any one of claim 7 or 9-11;
obtainable (e.g. obtained) from a plant propagated from a plant propagation material according to any one of claims 8-11; or
obtainable (e.g. obtained) by processing a harvested leaf of a plant according to claim 16 or 17; or
obtainable (e.g. obtained) from a plant produced by the method of any one of claim 5 or 6, or 9 to 11.

19. A processed leaf according to claim 18, wherein the leaf is processed by curing, fermenting, pasteurising or a combination thereof, preferably wherein the content of one or more TSNAs selected from N′-nitrosonornicotine (NNN), 4-(methylnitrosamino)-1-(3-pyridyl)-1-butanone (NNK), N′-nitrosoanatabine (NAT) and N-nitrosoanabasine (NAB) is decreased, wherein preferably the content of NNN and/or NNK is modulated (e.g. decreased), wherein more preferably the content of NNN is decreased.

20. A processed leaf according to claim 18 or 19, wherein the processed leaf is a cut processed leaf.

21. Cured tobacco material made from a plant or a part thereof:
obtainable (e.g. obtained) from a plant obtainable from a use according to any one of claim 4, 6 or 9-15;
obtainable (e.g. obtained) by processing a plant according to any one of claim 7 or 9-11;
obtainable (e.g. obtained) from a plant propagated from a plant propagation material according to any one of claims 8-11; or
obtainable (e.g. obtained) by processing a harvested leaf of a plant according to claim 16 or 17; or
obtainable from a plant produced by the method of any one of claim 5 or 6, or 9 to 11.

22. A tobacco blend comprising said cured tobacco material of claim 21.

23. A delivery system prepared from:
a tobacco plant according to any one of claim 7 or 9-11, or a part thereof according to any one of claim 7 or 9-11;
a tobacco plant or part thereof propagated from a tobacco plant propagation material according to any one of claims 8-11;
a harvested leaf of a plant according to claim 16 or 17;
a processed leaf according to any one of claim 18 or 19;
or
a plant produced by the method of any one of claim 5 or 6, or 9 to 11.

24. A delivery system according to claim 23, wherein the delivery system is a combustible smoking article.

25. A delivery system according to claim 23, wherein the delivery system is a smokeless delivery system.

26. A delivery system according to claim 25, wherein the delivery system is a non-combustible aerosol provision system such as a tobacco heating device or an aerosol-generating device.

27. A combustible smoking article, non-combustible aerosol provisioning system, smokeless delivery system or tobacco heating device comprising a plant or a part thereof according to any one of claims 7-11 or an extract (e.g. a tobacco extract) thereof; or a cured tobacco material according to claim 21; or a tobacco blend according to claim 22.

28. Use of a nucleotide sequence of a Nic3 locus (e.g. a Nic3 gene selected from a gene with SEQ ID No. 73, 118, 124 or 127 or a sequence which has at least 90% identity thereto or a functional variant or functional fragment or orthologue of said gene), and optionally a Nic1 locus (e.g. a Nic1 ERF gene) and/or Nic2 locus (e.g. a Nic2 ERF gene), to select a plant having reduced alkaloid content (e.g. nicotine content) and/or reduced content of tobacco specific nitrosamine (TSNA) or a precursor of a TSNA.

29. A mutant of a plant carrying at least one heritable mutation in a Nic3 locus (e.g. in a Nic3 gene selected from a gene with SEQ ID No. 73, 118, 124 or 127 or a sequence which has at least 90% identity thereto or a functional variant or functional fragment or orthologue of said gene), and optionally at least one heritable mutation in a Nic1 locus (e.g. in a Nic1 ERF gene) and/or at least one heritable mutation in a Nic2 locus (e.g. in a Nic2 ERF gene); wherein said heritable mutations decrease the alkaloid content (e.g. nicotine content), and/or decrease the content of a tobacco specific nitrosamine (TSNA) or a precursor of a TSNA in the mutant tobacco plant relative to a comparable plant which does not carry said heritable mutations.

30. Progeny or seed of a mutant plant which carries the heritable mutation according to claim 29.

31. A harvested leaf, a processed leaf or cured tobacco material produced from a plant comprising at least one mutation in a Nic3 locus (e.g. in a Nic3 ERF gene selected from a gene with SEQ ID No. 73, 118, 124 or 127 or a sequence which has at least 90% identity thereto or a functional variant or functional fragment or orthologue of said gene), and optionally at least one mutation in a Nic1 locus (e.g. in a Nic1 ERF gene) and/or at least one mutation in a Nic2 locus (e.g. in a Nic2 ERF gene) and wherein said plant has decreased nicotine content and/or decreased content of a tobacco specific nitrosamine (TSNA) or a precursor of a TSNA relative to a comparable plant which does not carry said mutations in a Nic3 locus, and optionally a Nic1 locus and/or a Nic2 locus.
